(19) United States
(12) Patent Application Publication
(10) Pub. No.: US 2011/0152173 A1
(43) Pub. Date: Jun. 23, 2011

(54) TNF-a ANTAGONIST MULTI-TARGET BINDING PROTEINS

(75) Inventors: Alan Keith Lofquist, Kirkland, WA (US); Kendall Mark Mohler, Poulsbo, WA (US); Peter Robert Baum, Seattle, WA (US); Peter Armstrong Thompson, Bellevue, WA (US); Lynda Misher, Seattle, WA (US)

(73) Assignee: Emergent Product Development Seattle ,LLC

(21) Appl. No.: 13/001,087

(22) PCT Filed: Jul. 2, 2009
(86) PCT No.: PCT/US2009/049603

§ 371 Date: Mar. 3, 2011

Related U.S. Application Data
(60) Provisional application No. 61/134,095, filed on Jul. 2, 2008.
(60) Provisional application No. 61/134,096, filed on Jul. 2, 2008.
(60) Provisional application No. 61/134,101, filed on Jul. 2, 2008.
(60) Provisional application No. 61/134,099, filed on Jul. 2, 2008.
(60) Provisional application No. 61/134,097, filed on Jul. 2, 2008.
(60) Provisional application No. 61/134,100, filed on Jul. 2, 2008.
(60) Provisional application No. 61/134,098, filed on Jul. 2, 2008.
(60) Provisional application No. 61/180,097, filed on May 20, 2009.

(51) Int. Cl. A61K 38/02; C07K 19/00; C07H 21/00; C12N 15/63; C12N 5/10; C12N 1/00; C12P 21/02; A61P 35/00; A61P 19/02; A61P 11/06; A61P 17/06; A61P 25/28; A61P 29/00; A61P 11/00

(52) U.S. Cl. 514/1.7; 530/409; 530/387.3; 514/1.1; 536/23.4; 435/320.1; 435/325; 435/243; 514/19.2; 514/16.6; 514/18.7; 514/17.8; 435/69.7

(57) ABSTRACT

This disclosure provides a multi-target fusion protein composed of a TNF-α antagonist domain and another binding domain antagonistic for a heterologous target, such as IL6, RANKL, IL7, IL17A/F, TWEAK, CSF2, IGF1, IGF2 or BLyS/APRIL, or agonistic for a heterologous target, such as IL10. The multi-specific fusion protein may also include an intervening domain that separates the binding domains and allows for dimerization. This disclosure also provides polynucleotides encoding the multi-specific fusion proteins, compositions of the fusion proteins, and methods of using the multi-specific fusion proteins and compositions.

### TECHNICAL FIELD

[0001] This disclosure relates generally to the field of multi-target binding molecules and therapeutic applications thereof and more specifically to fusion proteins composed of either a TNF-α antagonist domain and another binding domain antagonistic for a heterologous target, such as IL6, RANKL, IL7, IL17A/F, TWEAK, CSF2, IGF1, IGF2 or BLyS/APRIL, or a TNF-α antagonist domain and another binding domain agonistic for a heterologous target, such as IL10, as well as compositions and therapeutic uses thereof.

### BACKGROUND

[0002] Tumor Necrosis Factor Receptor (TNFR) is a member of the tumor necrosis factor receptor superfamily and is the receptor for Tumor Necrosis Factor-α (TNF-α), also known as CD120 or cachectin. There are two variants of this cytokine receptor, TNFR1 and TNFR2 (CD120a and CD120b receptors, respectively). TNFR1 has a molecular weight of about 55 KD and is therefore sometimes referred to as p55. TNFR2 has a molecular weight of about 75 KD and is therefore sometimes referred to as p75.

[0003] A majority of cell types and tissues appear to express both TNF receptors. Both exist on the cell surface as well as in soluble forms and both are active in signal transduction, although they can mediate distinct cellular responses. TNFR1 appears to be responsible for signaling most TNF responses. Among other activities, TNFR2 stimulates thymocyte proliferation, activates NF-κβ, and is an accessory to TNFR1 in the signaling of responses primarily mediated by TNFR1, such as cytotoxicity.

[0004] TNF antagonists, such as anti-TNF antibodies, can positively affect various inflammatory conditions. For example, infliximab is indicated in the United States for the treatment of rheumatoid arthritis, Crohn's disease, ankylosing spondylitis, psoriatic arthritis, plaque psoriasis, and ulcerative colitis. According to REMICADE® (infliximab) prescribing information, biological activities attributed to TNF include induction of pro-inflammatory cytokines such as interleukins (IL) 1 and 6, enhancement of leukocyte migration by increasing endothelial layer permeability and expression of adhesion molecules by endothelial cells and leukocytes, activation of neutrophil and eosinophil functional activity, induction of acute phase reactants and other liver proteins, as well as tissue degrading enzymes produced by synoviocytes and/or chondrocytes. Recently, perispinal delivery of the TNFα inhibitor etanercept has been shown to reduce symptoms in patients with Alzheimer's disease (Tobinick and Gross (2008) BMC Neurol. 8:27-36; Griffin (2008) J. Neuroinflammation, 5:3-6).

[0005] Bispecific molecules including a binding site specific for either a TNF receptor or TNFα, together with a binding site specific for a heterologous molecule have been described previously (see, for example, US 2008/0260757, US 2006/0073141, US 2007/0071675, WO 2006/074399 and WO 2007/146968). U.S. Pat. No. 7,300,656 describes bispecific molecules including an antigen binding domain of an anti-IFN-γ antibody and a receptor for TNF-α or an extracellular domain thereof.

### BRIEF DESCRIPTION OF THE FIGURES

[0006] FIGS. 1A-1C show that multi-specific (Xceptor) fusion proteins containing one of various different Hyper-IL6 binding domains fused to a TNFR ectodomain bind to Hyper-IL6 specifically as measured by ELISA, and that these multi-specific fusion proteins preferentially bind Hyper-IL6 over IL6 and IL6R alone. Only two fusion proteins tested bound IL6 and none bound sIL6R.

[0007] FIG. 2 shows that multi-specific fusion proteins containing a TNFR ectodomain fused to one of various different Hyper-IL6 binding domains bind to TNF-α as measured by ELISA.

[0008] FIG. 3 shows that multi-specific fusion proteins containing one of various different Hyper-IL6 binding domains fused to a TNFR ectodomain can simultaneously bind to Hyper-IL6 and TNF-α as measured by ELISA.

[0009] FIG. 4 shows that multi-specific fusion proteins containing one of various different Hyper-IL6 binding domains fused to a TNFR ectodomain block gp130 from binding to Hyper-IL6 as measured by ELISA.

[0010] FIGS. 5A and 5B show that multi-specific fusion proteins containing one of various different Hyper-IL6 binding domains fused to a TNFR ectodomain block (A) IL6 or (B) Hyper-IL6 induced proliferation of TF-1 cells.

[0011] FIG. 6 shows that multi-specific fusion proteins containing one of various different Hyper-IL6 binding domains fused to a TNFR ectodomain block TNF-α from binding to TNFR as measured by ELISA.

[0012] FIG. 7 shows that multi-specific fusion proteins containing a TNFR ectodomain fused to one of various different Hyper-IL6 binding domains block TNF-α induced killing of L929 cells.

[0013] FIG. 8 shows that multi-specific fusion proteins containing a TNFR ectodomain fused to the ectodomain of the human TWEAK receptor block TWEAK-induced killing of HT29 cells.

[0014] FIG. 9 shows that multi-specific fusion proteins containing a TNFR ectodomain fused to an OPG ectodomain block RANKL-mediated osteoclastogenesis in RAW 246.7 cells.

[0015] FIG. 10 shows that multi-specific fusion proteins containing a TNFR ectodomain fused to an IL6 binding domain did not bind to HepG2 (liver) cells.

[0016] FIG. 11 shows that multi-specific fusion proteins containing a TNFR ectodomain fused to an IL6 binding domain blocked the HIL6-induced SAA response in mice.

[0017] FIG. 12 shows that multi-specific fusion proteins containing a TNFR ectodomain fused to an IL6 binding domain blocked the HIL6-induced sgp130 response in mice.

[0018] FIGS. 13A and B show the results of studies on the ability of multi-specific fusion proteins containing a TNFR ectodomain fused to an IL6 binding domain to block the TNFα-induced SAA response in mice, at 2 hours and 24 hours post-administration, respectively.

### DETAILED DESCRIPTION

[0019] The present disclosure provides multi-specific fusion proteins, referred to herein as xceptor molecules. Exemplary structures of such multi-specific fusion proteins, include N-BD-ID-ED-C, N-ED-ID-BD-C, and N-ED1-ID-ED2-C, wherein N- and -C represent the amino- and carboxy-terminus, respectively, BD is an immunoglobulin-like or immunoglobulin variable region binding domain, ID is an intervening domain, and ED is an ectodomain (e.g. an extracellular domain), such as a receptor ligand binding domain, cysteine rich domain (e.g. LDL receptor Class A domain; see WO 02/088171 and WO 04/044011), semaphorin or semaphorin-like domain, or the like. In some constructs, the ID can comprise an immunoglobulin constant region or sub-region disposed between the first and second binding domains. In still further constructs, the BD and ED are each linked to the ID via the same or different linker (e.g., a linker comprising one to 50 amino acids), such as an immunoglobulin hinge region (made up of, for example, the upper and core regions) or functional variant thereof, or a lectin interdomain region or functional variant thereof, or a cluster of differentiation (CD) molecule stalk region or functional variant thereof.

[0020] Prior to setting forth this disclosure in more detail, it may be helpful to an understanding thereof to provide definitions of certain terms to be used herein. Additional definitions are set forth throughout this disclosure.

[0021] In the present description, any concentration range, percentage range, ratio range, or integer range is to be understood to include the value of any integer within the recited range and, when appropriate, fractions thereof (such as one tenth and one hundredth of an integer), unless otherwise indicated. Also, any number range recited herein relating to any physical feature, such as polymer subunits, size or thickness, are to be understood to include any integer within the recited range, unless otherwise indicated. As used herein, “about” or “consisting essentially of” mean±20% of the indicated range, value, or structure, unless otherwise indicated. It should be understood that the terms “a” and “an” as used herein refer to “one or more” of the enumerated components. The use of the alternative (e.g., “or”) should be understood to mean either one, both, or any combination thereof of the alternatives. As used herein, the terms “include” and “comprise” are used synonymously. In addition, it should be understood that the individual compounds, or groups of compounds, derived from the various combinations of the structures and substituents described herein, are disclosed by the present application to the same extent as if each compound or group of compounds was set forth individually. Thus, selection of particular structures or particular substituents is within the scope of the present disclosure.

[0022] A “binding domain” or “binding region” according to the present disclosure may be, for example, any protein, polypeptide, oligopeptide, or peptide that possesses the ability to specifically recognize and bind to a biological molecule (e.g., TNF-α or IL6) or complex of more than one of the same or different molecule or assembly or aggregate, whether stable or transient (e.g., IL6/IL6R complex). Such biological molecules include proteins, polypeptides, oligopeptides, peptides, amino acids, or derivatives thereof, lipids, fatty acids, or derivatives thereof; carbohydrates, saccharides, or derivatives thereof; nucleotides, nucleosides, peptide nucleic acids, nucleic acid molecules, or derivatives thereof; glycoproteins, glycopeptides, glycolipids, lipoproteins, proteolipids, or derivatives thereof; other biological molecules that may be present in, for example, a biological sample; or any combination thereof. A binding region includes any naturally occurring, synthetic, semi-synthetic, or recombinantly produced binding partner for a biological molecule or other target of interest. A variety of assays are known for identifying binding domains of the present disclosure that specifically bind with a particular target, including Western blot, ELISA, or Biacore® analysis.

[0023] Binding domains and fusion proteins thereof of this disclosure are capable of binding to a desired degree, including “specifically or selectively binding” a target while not significantly binding other components present in a test sample, if they bind a target molecule with an affinity or Kₐ (i.e., an equilibrium association constant of a particular binding interaction with units of 1/M) of, for example, greater than or equal to about 10⁵ M⁻¹, 10⁶ M⁻¹, 10⁷ M⁻¹, 10⁸ M⁻¹, 10⁹ M⁻¹, , 10¹⁰ M⁻¹, 10¹¹ M⁻¹, 10¹² M⁻¹, or 10¹³ M⁻¹. “High affinity” binding domains refers to those binding domains with a Kₐ of at least 10⁷ M⁻¹, at least 10⁸ M⁻¹, at least 10⁹ M⁻¹, at least 10¹⁰ M⁻¹, at least 10¹¹ M⁻¹ at least 10¹² M⁻¹ at least 10¹³ M⁻¹, or greater. Alternatively, affinity may be defined as an equilibrium dissociation constant (K_{d}) of a particular binding interaction with units of M (e.g., 10⁻⁵ M to 10⁻¹³ M). Affinities of binding domain polypeptides and fusion proteins according to the present disclosure can be readily determined using conventional techniques (see, e.g., Scatchard et al. (1949) Ann. N.Y. Acad. Sci. 51:660; U.S. Pat. Nos. 5,283,173; 5,468,614; Biacore® analysis; or the equivalent).

[0024] Binding domains of this disclosure can be generated as described herein or by a variety of methods known in the art (see, e.g., U.S. Pat. Nos. 6,291,161; 6,291,158). Sources include antibody gene sequences from various species (which can be formatted as antibodies, sFvs, scFvs or Fabs, such as in a phage library), including human, camelid (from camels, dromedaries, or llamas; Hamers-Casterman et al. (1993) Nature, 363:446 and Nguyen et al. (1998) J. Mol. Biol., 275:413), shark (Roux et al. (1998) Proc. Nat'l. Acad. Sci. (USA) 95:11804), fish (Nguyen et al. (2002) Immunogenetics, 54:39), rodent, avian, ovine, sequences that encode random peptide libraries or sequences that encode an engineered diversity of amino acids in loop regions of alternative non-antibody scaffolds, such as fibrinogen domains (see, e.g., Weisel et al. (1985) Science 230:1388), Kunitz domains (see, e.g., U.S. Pat. No. 6,423,498), lipocalin domains (see, e.g., WO 2006/095164), V-like domains (see, e.g., US Patent Application Publication No. 2007/0065431), C-type lectin domains (Zelensky and Gready (2005) FEBS J. 272:6179), mAb² or Fcab™ (see, e.g., PCT Patent Application Publication Nos. WO 2007/098934; WO 2006/072620), or the like. Additionally, traditional strategies for hybridoma development using a synthetic single chain IL6/IL6R complex, such as a human IL6/IL6R complex or Hyper-IL6 (IL6 joined by a peptide linker IL6R), as an immunogen in convenient systems (e.g., mice, HuMAb Mouse®, TC Mouse™, KM-mouse®, llamas, chicken, rats, hamsters, rabbits, etc.) can be used to develop binding domains of this disclosure.

[0025] Terms understood by those in the art as referring to antibody technology are each given the meaning acquired in the art, unless expressly defined herein. For example, the terms “V_{L}” and “V_{H}” refer to the variable binding region derived from an antibody light and heavy chain, respectively. The variable binding regions are made up of discrete, well-defined sub-regions known as “complementarity determining regions” (CDRs) and “framework regions” (FRs). The terms “C_{L}” and “C_{H}” refer to an “immunoglobulin constant region,” i.e., a constant region derived from an antibody light or heavy chain, respectively, with the latter region understood to be further divisible into C_{H1}, C_{H2}, C_{H3} and C_{H4} constant region domains, depending on the antibody isotype (IgA, IgD, IgE, IgG, IgM) from which the region was derived. A portion of the constant region domains makes up the Fc region (the “fragment crystallizable” region), which contains domains responsible for the effector functions of an immunoglobulin, such as ADCC (antibody-dependent cell-mediated cytotoxicity), ADCP (antibody-dependent cell-mediated phagocytosis), CDC (complement-dependent cytotoxicity) and complement fixation, binding to Fc receptors, greater half-life in vivo relative to a polypeptide lacking an Fc region, protein A binding, and perhaps even placental transfer (see Capon et al. (1989) Nature, 337:525). Further, a polypeptide containing an Fc region allows for dimerization or multimerization of the polypeptide. A “hinge region,” also referred to herein as a “linker,” is an amino acid sequence interposed between and connecting the variable binding and constant regions of a single chain of an antibody, which is known in the art as providing flexibility in the form of a hinge to antibodies or antibody-like molecules.

[0026] The domain structure of immunoglobulins is amenable to engineering, in that the antigen binding domains and the domains conferring effector functions may be exchanged between immunoglobulin classes and subclasses. Immunoglobulin structure and function are reviewed, for example, in Harlow et al., Eds., Antibodies: A Laboratory Manual, Chapter 14 (Cold Spring Harbor Laboratory, Cold Spring Harbor, 1988). An extensive introduction as well as detailed information about all aspects of recombinant antibody technology can be found in the textbook Recombinant Antibodies (John Wiley & Sons, NY, 1999). A comprehensive collection of detailed antibody engineering lab Protocols can be found in R. Kontermann and S. Dübel, Eds., The Antibody Engineering Lab Manual (Springer Verlag, Heidelberg/N.Y., 2000).

[0027] “Derivative” as used herein refers to a chemically or biologically modified version of a compound that is structurally similar to a parent compound and (actually or theoretically) derivable from that parent compound. Generally, a “derivative” differs from an “analogue” in that a parent compound may be the starting material to generate a “derivative,” whereas the parent compound may not necessarily be used as the starting material to generate an “analogue.” An analogue may have different chemical or physical properties of the parent compound. For example, a derivative may be more hydrophilic or it may have altered reactivity (e.g., a CDR having an amino acid change that alters its affinity for a target) as compared to the parent compound.

[0028] The term “biological sample” includes a blood sample, biopsy specimen, tissue explant, organ culture, biological fluid or any other tissue or cell or other preparation from a subject or a biological source. A subject or biological source may, for example, be a human or non-human animal, a primary cell culture or culture adapted cell line including genetically engineered cell lines that may contain chromosomally integrated or episomal recombinant nucleic acid sequences, somatic cell hybrid cell lines, immortalized or immortalizable cell lines, differentiated or differentiatable cell lines, transformed cell lines, or the like. In further embodiments of this disclosure, a subject or biological source may be suspected of having or being at risk for having a disease, disorder or condition, including a malignant disease, disorder or condition or a B cell disorder. In certain embodiments, a subject or biological source may be a hyperproliferative, inflammatory, or autoimmune disease, and in certain other embodiments of this disclosure the subject or biological source may be known to be free of a risk or presence of such disease, disorder, or condition.

[0029] In certain embodiments, the present disclosure makes possible the depletion or modulation of cells associated with aberrant TNF-α activity by providing multi-specific fusion proteins that bind both a TNF-α and a second target other than TNF-α, such as IL6, IL6R, an IL6/IL6R complex, receptor activator of nuclear factor kappa B ligand (RANKL, also known as TNFSF11, ODF, CD254), IL7, IL17A, IL17F, IL17A/F, Tumor necrosis factor-like weak inducer of apoptosis (TWEAK; also known as tumor necrosis factor (ligand) superfamily, member 12, TNFSF12), colony stimulating factor 2 (CSF2, also known as granulocyte-macrophage colony stimulating factor or GM-CSF); insulin-like growth factor-1 (IGF1); insulin-like growth factor-2 (IGF2); IL10; or a TNFSF13 family protein (e.g., TNFSF13, also known as a proliferation-inducing ligand, APRIL, CD256; or TNFSF13B, also known as B-lymphocyte stimulator, BLyS, CD257, BAFF). In certain embodiments, a multi-specific fusion protein comprises a first and second binding domain, a first and second linker, and an intervening domain, wherein one end of the intervening domain is fused via a linker to a first binding domain that is a TNF-α ectodomain (e.g., an extracellular domain, one or more cysteine rich domains (CRDs), such as CRD1, CRD2, CRD3) and at the other end is fused via a linker to a second binding domain. In some embodiments, less than an entire TNF-α ectodomain is employed. Specifically, domains within the ectodomain that function as a TNF-α antagonist or confer ligand binding are employed. In some embodiments, the second binding domain is not an IFNγ binding domain, such as an anti-IFNγ immunoglobulin domain or an IFNγ receptor ectodomain.

[0030] In certain embodiments the second binding domain is an IL6 antagonist (such as an immunoglobulin variable region that is specific for an IL6 or IL6/IL6Rα complex), a RANKL antagonist (such as an immunoglobulin region variable region that is specific for RANKL, or an osteoprotegrin ectodomain (e.g. SEQ ID NO:737) or RANKL binding fragment thereof), an IL7 antagonist (such as an immunoglobulin binding domain specific for IL7 or IL7Rα, or an IL7Rα ectodomain (e.g. SEQ ID NO:738 or 739) or IL7 binding fragment thereof), an IL17A/F antagonist (such as an immunoglobulin binding domain specific for IL17A, IL17F, IL17A/F, IL17RA, IL17RC, IL17RA/C, an IL17RA ectodomain (e.g. SEQ ID NOS:739, 816), an IL17RA/C ectodomain, an IL17R/C ectodomain (e.g. SEQ ID NOS:740, 817) or IL17A, IL17F or IL17A/F binding fragment thereof), a TWEAK antagonist (such as an immunoglobulin binding domain specific for TWEAK or TWEAKR, or a TWEAKR ectodomain (e.g. SEQ ID NO:741) or TWEAK binding fragment thereof), a CSF2 antagonist (such as an immunoglobulin binding domain specific for CSF2 or CSF2Rα, or a CSF2Rα ectodomain (e.g. SEQ ID NO:742) or CSF2 binding fragment thereof), an IGF1 or IGF2 antagonist (such as an immunoglobulin binding domain specific for IGF1 or IGF2, or an ectodomain of IGF1R (e.g. SEQ ID NOS:746, 818) or IGFBP (e.g., SEQ ID NOS:747-753) or an IGF-binding fragment thereof), or a BLyS/APRIL antagonist (such as an immunoglobulin binding domain specific for BLyS/APRIL or TACI, or a TACI ectodomain (e.g., SEQ ID NO:743) or a BAFFR (also known as TNFRSF13C) ectodomain (e.g., amino acids 1-76 of GenBank Accession No. NP_{—}443177.1) or BLys/APRIL binding fragment thereof). In yet other embodiments, the second binding domain is an IL10 agonist, such as an IL10 (e.g. SEQ ID NO:754) or a IL10Fc, or a functional sub-domain thereof, or a single chain binding protein, such as an scFv, that specifically binds to IL10R1 or IL10R2.

[0031] The complex of IL6 with membrane or soluble IL6 receptor (IL6Rα) is referred to herein as IL6xR when referring to IL6 with either membrane IL6Rα or soluble IL6Rα (sIL6Rα), and as sIL6xR when referring only to the complex of IL6 with sIL6Rα. In some embodiments, multi-specific fusion proteins containing a binding domain specific for IL6xR have one or more of the following properties: (1) have greater or equal affinity for an IL6xR complex than for IL6 alone or IL6Rα alone, or have greater affinity for IL6Rα alone or an IL6xR complex than for IL6 alone; (2) compete with membrane gp130 for binding with a sIL6xR complex or enhance soluble gp130 binding with a sIL6xR complex; (3) preferentially inhibit IL6 trans-signaling over IL6 cis-signaling; and (4) do not inhibit signaling of gp130 family cytokines other than IL6.

### TNF-α Antagonists

[0032] TNFRs are type I transmembrane proteins having an extracellular domain that contains three well ordered cysteine rich domains (CRD1, CRD2, CRD3) characteristic of the TNFR superfamily, and a fourth less well conserved, membrane proximal CRD (Banner et al. (1993) Cell 73:431). A TNF-α antagonist of this disclosure inhibits the inflammatory or hyperproliferative activity of TNF-α. The antagonist domains may block TNFR multimerization or TNF-α binding, or the domains may bind to components of the receptor system and block activity either by preventing ligand activity or by preventing the assembly of the receptor complex. Various TNF-α antagonists are known in the art, including anti-TNF antibodies, such as infliximab, and soluble TNF receptor (sTNFR). Such antibody antagonists bind and inhibit TNF-α, but do not significantly inhibit TNF-β. Anti-TNF antibodies, including monoclonal antibodies, can be prepared using known techniques and are known in the art (see, e.g., U.S. Pat. No. 6,509,015). A TNF-α antagonist of this disclosure can also comprise one or more TNF-α binding domains present in a TNFR ectodomain.

[0033] TNF-α antagonists contemplated include a TNFR extracellular domain or sub-domain, one or more TNFR CRD domains (such as CRD2 and CRD3), or TNF-α-specific antibody-derived binding domains (analogous to the IL6 or IL6xR complex-specific antibody-derived binding domain described herein). In some embodiments, a TNF-α antagonist may be an extracellular domain (“ectodomain”) of a TNFR, such as an ectodomain of TNFR1 or TNFR2. As used herein, a TNFR ectodomain refers to a sTNFR, one or more CRDs, or any combination thereof of the TNFR domains. In certain embodiments, a TNF-α antagonist comprises an amino-terminal portion of TNFR2 (also known as p75, TNFRSF1B), such as the first 257 amino acids of TNFR2 as set forth in GenBank Accession No. NP_{—}001057.1 (SEQ ID NO:671). In other embodiments, a TNF-α antagonist comprises amino acids 23-257 of SEQ ID NO:671 (i.e., without the native leader sequence). In preferred embodiments, a TNF-α antagonist comprises a fragment of TNFR2 (e.g., an ectodomain), such amino acids 23-163 of SEQ ID NO:671 or amino acids 23-185 of SEQ ID NO:671 or amino acids 23-235 of SEQ ID NO:671. In other preferred embodiments, a TNF-α antagonist comprises a derivative of a TNFR2 fragment, such amino acids 23-163 of SEQ ID NO:671 with a deletion of amino acid glutamine at position 109 or amino acids 23-185 of SEQ ID NO:671 with a deletion of amino acid glutamine at position 109 and a deletion of amino acid proline at position 109 or amino acids 23-235 of SEQ ID NO:671 with a deletion of amino acid glutamine at position 109, a deletion of amino acid proline at position 109, and an substitution of amino acid aspartate at position 235 (to, for example, a threonine, alanine, serine, or glutamate). In further embodiments, a TNF-α antagonist comprises an amino-terminal portion of TNFR1 (also known as p55, TNFRSF1A), such as the first 211 amino acids of TNFR1 as set forth in GenBank Accession No. NP_{—}001056.1 (SEQ ID NO:672). In other embodiments, a TNF-α antagonist comprises amino acids 31-211 of SEQ ID NO:672 (i.e., without the native leader sequence).

[0034] In one aspect, a TNF-α antagonist or fusion protein thereof of this disclosure is specific for TNF-α wherein it has an affinity with a dissociation constant (KO of about 10⁻⁵ M to 10⁻¹³ M, or less. In certain embodiments, the TNF-α antagonist or fusion protein thereof binds TNF-α with an affinity that is less than about 300 μM. Another measure, the kinetic dissociation (k_{d}), also referred to herein as k_{OFF}, is a measure of the rate of complex dissociation and, thus, the ‘dwell time’ of the target molecule bound by a polypeptide binding domain of this disclosure. The k_{d} (k_{OFF}) has units of 1/sec. Exemplary TNF-α antagonists of this disclosure can have a k_{OFF} of about 10⁻⁴/sec (e.g., about a day) to about 10⁻⁸/sec or less. In certain embodiments, the k_{OFF} can range from about 10⁻¹/sec, about 10⁻²/sec, about 10⁻³/sec, about 10⁻⁴/sec, about 10⁻⁵/sec, about 10⁻⁶/sec, about 10⁻⁷/sec, about 10⁻⁸/sec, about 10⁻⁹/sec, about 10⁻¹⁰/sec, or less (see Graff et al. (2004) Protein Eng. Des. Sel. 17:293). In some embodiments, a TNF-α antagonist or fusion protein thereof of this disclosure will bind TNF-α with higher affinity and have a lower k_{OFF} rate as compared to the cognate TNFR binding to TNF-α. In further embodiments, a TNF-α antagonist or fusion protein thereof of this disclosure that blocks or alters TNF-α dimerization or other cell surface activity may have a more moderate affinity (i.e., a K_{d} of about 10⁻⁸ M to about 10⁻⁹ M) and a more moderate off rate (i.e., a k_{OFF} closer to about 10⁻⁴/sec) as compared to the affinity and dimerization rate of cognate TNFR.

[0035] Exemplary binding domains that function as TNF-α antagonists of this disclosure can be generated as described herein or by a variety of methods known in the art (see, e.g., U.S. Pat. Nos. 6,291,161, 6,291,158). Sources include antibody gene sequences from various species (which can be formatted as scFvs or Fabs, such as in a phage library), including human, camelid (from camels, dromedaries, or llamas; Hamers-Casterman et al. (1993) Nature, 363:446 and Nguyen et al. (1998) J. Mol. Biol., 275:413), shark (Roux et al. (1998) Proc. Nat'l. Acad. Sci. (USA) 95:11804), fish (Nguyen et al. (2002) Immunogenetics, 54:39), rodent, avian, ovine, sequences that encode random peptide libraries or sequences that encode an engineered diversity of amino acids in loop regions of alternative non-antibody scaffolds, such as fibrinogen domains (see, e.g., Weisel et al. (1985) Science 230:1388), Kunitz domains (see, e.g., U.S. Pat. No. 6,423,498), lipocalin domains (see, e.g., WO 2006/095164), V-like domains (see, e.g., US Patent Publication No. 2007/0065431), C-type lectin domains (Zelensky and Gready (2005) FEBS J. 272:6179), or the like. Additionally, traditional strategies for hybridoma development using a synthetic TNF-α or single chain TNFR ectodomain as an immunogen in convenient systems (e.g., mice, HuMAb Mouse®, TC Mouse™, KM-mouse®, llamas, chicken, rats, hamsters, rabbits, etc.) can be used to develop binding domains of this disclosure.

[0036] In an illustrative example, TNF-α antagonists of this disclosure specific for an TNF-α or single chain TNFR ectodomain can be identified using a Fab phage library of fragments (see, e.g., Hoet et al. (2005) Nature Biotechnol. 23:344) by screening for binding to a synthetic or recombinant TNF-α (using an amino acid sequence or fragment thereof as set forth in GenBank Accession No. NP_{—}000585.2) or single chain TNFR ectodomain. A TNF-α or a single chain TNFR ectodomain, as described herein or known in the art, can be used for such a screening. In certain embodiments, a TNF-α or single chain TNFR ectodomain used to generate a TNF-α antagonist can further comprise an intervening domain or a dimerization domain, as described herein, such as an immunoglobulin Fc domain or fragment thereof.

[0037] In some embodiments, TNF-α antagonist domains of this disclosure comprise V_{H} and V_{L} domains as described herein. In certain embodiments, the V_{H} and V_{L} domains are rodent (e.g., mouse, rat), humanized, or human. In further embodiments, there are provided TNF-α antagonist domains of this disclosure that have a sequence that is at least 80%, at least 85%, at least 90%, at least 91%, at least 92%, at least 93%, at least 94%, at least 95%, at least 96%, at least 97%, at least 98%, at least 99%, at least 99.5%, or at least 100% identical to the amino acid sequence of one or more light chain variable regions (V_{L}) or to one or more heavy chain variable regions (V_{H}), or both, wherein each CDR has at most three amino acid changes (i.e., many of the changes will be in the framework regions).

[0038] The terms “identical” or “percent identity,” in the context of two or more polypeptide or nucleic acid molecule sequences, means two or more sequences or subsequences that are the same or have a specified percentage of amino acid residues or nucleotides that are the same over a specified region (e.g., 60%, 65%, 70%, 75%, 80%, 85%, 90%, 91%, 92%, 93%, 94%, 95%, 96%, 97%, 98%, 99%, or 100% identity), when compared and aligned for maximum correspondence over a comparison window, or designated region, as measured using methods known in the art, such as a sequence comparison algorithm, by manual alignment, or by visual inspection. For example, preferred algorithms suitable for determining percent sequence identity and sequence similarity are the BLAST and BLAST 2.0 algorithms, which are described in Altschul et al. (1977) Nucleic Acids Res. 25:3389 and Altschul et al. (1990) J. Mol. Biol. 215:403, respectively.

[0039] In any of these or other embodiments described herein, the V_{L} and V_{H} domains may be arranged in either orientation and may be separated by about a five to about a thirty amino acid linker as disclosed herein or any other amino acid sequence capable of providing a spacer function compatible with interaction of the two sub-binding domains. In certain embodiments, a linker joining the V_{H} and V_{L} domains comprises an amino acid sequence as set forth in SEQ ID NO:497-604 and 791-796, such as Linker 47 (SEQ ID NO:543) or Linker 80 (SEQ ID NO:576). Multi-specific binding domains will have at least two specific sub-binding domains, by analogy to camelid antibody organization, or at least four specific sub-binding domains, by analogy to the more conventional mammalian antibody organization of paired V_{H} and V_{L} chains.

[0040] In further embodiments, TNF-α antagonist domains and fusion proteins thereof of this disclosure may comprise a binding domain including one or more complementarity determining region (“CDR”), or multiple copies of one or more such CDRs, which have been obtained, derived, or designed from variable regions of an anti-TNF-α or anti-TNFR scFv or Fab fragment or from heavy or light chain variable regions thereof.

[0041] CDRs are defined in various ways in the art, including the Kabat, Chothia, AbM, and contact definitions. The Kabat definition is based on sequence variability and is the most commonly used definition to predict CDR regions (Johnson et al. (2000) Nucleic Acids Res. 28:214). The Chothia definition is based on the location of the structural loop regions (Chothia et al. (1986) J. Mol. Biol. 196:901; Chothia et al. (1989) Nature 342:877). The AbM definition, a compromise between the Kabat and Chothia definitions, is an integral suite of programs for antibody structure modeling produced by the Oxford Molecular Group (Martin et al. (1989) Proc. Nat'l. Acad. Sci. (USA) 86:9268; Rees et al., ABMTM, a computer program for modeling variable regions of antibodies, Oxford, UK; Oxford Molecular, Ltd.). An additional definition, known as the contact definition, has been introduced more recently (see MacCallum et al. (1996) J. Mol. Biol. 5:732), which is based on an analysis of available complex crystal structures.

[0042] By convention, the CDR domains in the heavy chain are referred to as H1, H2, and H3, which are numbered sequentially in order moving from the amino terminus to the carboxy terminus. The CDR-H1 is about ten to 12 residues in length and starts four residues after a Cys according to the Chothia and AbM definitions, or five residues later according to the Kabat definition. The H1 can be followed by a Trp, Trp-Val, Trp-Ile, or Trp-Ala. The length of H1 is approximately ten to 12 residues according to the AbM definition, while the Chothia definition excludes the last four residues. The CDR-H2 starts 15 residues after the end of H1 according to the Kabat and AbM definitions, which is generally preceded by sequence Leu-Glu-Trp-Ile-Gly (but a number of variations are known) and is generally followed by sequence Lys/Arg-Leu/Ile/Val/Phe/Thr/Ala-Thr/Ser/Ile/Ala. According to the Kabat definition, the length of H2 is about 16 to 19 residues, while the AbM definition predicts the length to be nine to 12 residues. The CDR-H3 usually starts 33 residues after the end of H2, is generally preceded by the amino acid sequence Cys-Ala-Arg and followed by the amino acid Gly, and has a length that ranges from three to about 25 residues.

[0043] By convention, the CDR regions in the light chain are referred to as L1, L2, and L3, which are numbered sequentially in order moving from the amino terminus to the carboxy terminus. The CDR-L1 generally starts at about residue 24 and generally follows a Cys. The residue after the CDR-L1 is always Trp, which begins one of the following sequences: Trp-Tyr-Gln, Trp-Leu-Gln, Trp-Phe-Gln, or Trp-Tyr-Leu. The length of CDR-L1 is approximately ten to 17 residues. The CDR-L2 starts about 16 residues after the end of L1 and will generally follow residues Ile-Tyr, Val-Tyr, Ile-Lys, or Ile-Phe. The CDR-L2 is about seven residues in length. The CDR-L3 usually starts 33 residues after the end of L2 and generally follows a Cys, which is generally followed by the sequence Phe-Gly-XXX-Gly and has a length of about seven to 11 residues.

[0044] Thus, a binding domain of this disclosure can comprise a single CDR from a variable region of an anti-TNF-α or anti-TNFR, or it can comprise multiple CDRs that can be the same or different. In certain embodiments, binding domains of this disclosure comprise V_{H} and V_{L} domains specific for a TNF-α or TNFR comprising framework regions and CDR1, CDR2 and CDR3 regions, wherein (a) the V_{H} domain comprises an amino acid sequence of a heavy chain CDR3; or (b) the V_{L} domain comprises an amino acid sequence of a light chain CDR3; or (c) the binding domain comprises a V_{H} amino acid sequence of (a) and a V_{L} amino acid sequence of (b); or the binding domain comprises a V_{H} amino acid sequence of (a) and a V_{L} amino acid sequence of (b) and wherein the V_{H} and V_{L} are found in the same reference sequence. In further embodiments, binding domains of this disclosure comprise V_{H} and V_{L} domains specific for an TNF-α or TNFR comprising framework regions and CDR1, CDR2 and CDR3 regions, wherein (a) the V_{H} domain comprises an amino acid sequence of a heavy chain CDR1, CDR2, and CDR3; or (b) the V_{L} domain comprises an amino acid sequence of a light chain CDR1, CDR2, and CDR3; or (c) the binding domain comprises a V_{H} amino acid sequence of (a) and a V_{L} amino acid sequence of (b); or the binding domain comprises a V_{H} amino acid sequence of (a) and a V_{L} amino acid sequence of (b), wherein the V_{H} and V_{L} amino acid sequences are from the same reference sequence.

[0045] In any of the embodiments described herein comprising specific CDRs, a binding domain can comprise (i) a V_{H} domain having an amino acid sequence that is at least 80%, 85%, 90%, 91%, 92%, 93%, 94%, 95%, 96%, 97%, 98%, or 99% identical to the amino acid sequence of a V_{H} domain, wherein each CDR has at most three amino acid changes (i.e., many of the changes will be in the framework regions); or (ii) a V_{L} domain having an amino acid sequence that is at least 80%, 85%, 90%, 91%, 92%, 93%, 94%, 95%, 96%, 97%, 98%, or 99% identical to the amino acid sequence of a V_{L} domain, wherein each CDR has at most three amino acid changes (i.e., many of the changes will be in the framework regions); or (iii) both a V_{H} domain of (i) and a V_{L} domain of (ii); or both a V_{H} domain of (i) and a V_{L} domain of (ii) wherein the V_{H} and V_{L} are from the same reference sequence.

[0046] A TNF-α antagonist domain of fusion proteins of this disclosure may be an immunoglobulin-like domain such as an immunoglobulin scaffold. Immunoglobulin scaffolds contemplated by this disclosure include, but are not limited to, a scFv, a domain antibody or a heavy chain-only antibody. In a scFv, this disclosure contemplates the heavy and light chain variable regions are joined by any linker peptide known in the art to be compatible with domain or region joinder in a binding molecule. Exemplary linkers are linkers based on the Gly₄Ser linker motif, such as (Gly₄Ser)ₙ, wherein n=1-5. If a binding domain of a fusion protein of this disclosure is based on a non-human immunoglobulin or includes non-human immunoglobulin CDRs, the binding domain may be “humanized” according to methods known in the art.

[0047] Alternatively, a TNF-α antagonist domain of fusion proteins of this disclosure may be a scaffold other than an immunoglobulin scaffold. Other scaffolds contemplated by this disclosure present the TNF-α-specific CDR(s) in a functional conformation. Other scaffolds contemplated include, but are not limited to, an A domain molecule, a fibronectin III domain, an anticalin, an ankyrin-repeat engineered binding molecule, an adnectin, a Kunitz domain or a protein AZ domain affibody.

### IL6 Antagonists

[0048] As noted above, in certain embodiments the present disclosure provides polypeptides containing a binding region or domain that is an IL6 antagonist (e.g., preferentially inhibits IL6 trans-signaling or inhibits both IL6 cis- and trans-signaling). In certain embodiments, the present disclosure provides multi-specific fusion proteins containing a binding region or domain specific for an IL6/IL6R complex that has one or more of the following properties: (1) greater or equal affinity for an IL6xR complex than for IL6 or IL6Rα alone or has greater affinity for IL6Rα alone or an IL6/IL6R complex than for IL6 alone, (2) competes with membrane gp130 for binding with a sIL6/IL6R complex or augments soluble gp130 binding to sIL6/IL6R complex, (3) preferentially inhibits IL6 trans-signaling over IL6 cis-signaling, or (4) does not inhibit signaling of gp130 family cytokines other than IL6. In certain preferred embodiments, a binding domain specific for an IL6/IL6R complex according to this disclosure has the following properties: (1) greater affinity for IL6Rα alone or an IL6/IL6R complex than for IL6 alone, (2) augments soluble gp130 binding to sIL6xR complex, (3) preferentially inhibits IL6 trans-signaling over IL6 cis-signaling, and (4) does not inhibit signaling of gp130 family cytokines other than IL6. For example, a binding region or domain specific for an IL6/IL6R complex may be an immunoglobulin variable binding domain or derivative thereof, such as an antibody, Fab, scFv, or the like. In the context of this disclosure, it should be understood that a binding region or domain specific for an IL6/IL6R complex is not gp130 as described herein.

[0049] As used herein, “IL6xR complex” or “IL6xR” refers to a complex of an IL6 with an IL6 receptor, wherein the IL6 receptor (also known as, for example, IL6Rα, IL6RA, IL6R1, and CD126) is either a membrane protein (referred to herein as mIL6Ror mIL6Rα) or a soluble form (referred to herein as sIL6R or sIL6Rα). The term “IL6R” encompasses both mIL6Rα and sIL6Rα. In one embodiment, IL6xR comprises a complex of IL6 and mIL6Rα. In certain embodiments, the IL6xR complex is held together via one or more covalent bonds. For example, the carboxy terminus of an IL6R can be fused to the amino-terminus of an IL6 via a peptide linker, which is known in the art as a Hyper-IL6 (see, e.g., Fischer et al. (1997) Nat. Biotechnol. 15:142). A Hyper-IL6 linker can be comprised of a cross-linking compound, a one to 50 amino acid sequence, or a combination thereof. A Hyper-IL6 may further include an additional peptide tag or tags (e.g., AviFlagHis), or further include a dimerization domain, such as an immunoglobulin Fc domain or an immunoglobulin constant domain sub-region. In certain embodiments, the IL6xR complex is held together via non-covalent interactions, such as by hydrogen bonding, electrostatic interactions, Van der Waal's forces, salt bridges, hydrophobic interactions, or the like, or any combination thereof. For example, an IL6 and IL6R can naturally associate non-covalently (e.g., as found in nature, or as synthetic or recombinant proteins) or each can be fused to a domain that promotes multimerization, such as an immunoglobulin Fc domain, to further enhance complex stability.

[0050] As used herein, “gp130” refers to a signal transduction protein that binds to an IL6xR complex. The gp130 protein can be in a membrane (mgp130), soluble (sgp130), or any other functional form thereof. Exemplary gp130 proteins have a sequence as set forth in GenBank Accession No. NP_{—}002175.2 or any soluble or derivative form thereof (see, e.g., Narazaki et al. (1993) Blood 82:1120 or Diamant et al. (1997) FEBS Lett. 412:379). By way of illustration and not wishing to be bound by theory, an mgp130 protein can bind to either an IL6/mILR or an IL6/sILR complex, whereas a sgp130 primarily binds with an IL6/sILR complex (see Scheller et al. (2006) Scand. J. Immunol. 63:321). Thus, certain embodiments of binding domains, or fusion proteins thereof, of the instant disclosure can inhibit IL6xR complex trans-signaling by binding with higher affinity to IL6xR than to either IL6 or IL6Rα alone and preferably by competing with sIL6xR complex binding to mgp130. A binding domain of the instant disclosure “competes” with gp130 binding to a sIL6xR when (1) a binding domain or fusion protein thereof prevents gp130 from binding a sIL6xR and the binding domain binds sIL6xR with equal or higher affinity as compared to the binding of gp130 with sIL6xR, or (2) a binding domain or fusion protein thereof enhances or promotes sgp130 binding to sIL6xR and thereby reduces the amount of time sIL6xR complex is available for binding to mgp130.

[0051] In one aspect, an IL6 antagonist binding domain of this disclosure has an affinity for IL6 or IL6xR complex that is at least 2-fold to 1000-fold greater than for IL6Rα alone or has an affinity for IL6Rα or IL6xR complex that is at least 2-fold to 1000-fold greater than for IL6 alone. By binding to IL6, IL6R, or IL6xR complex, an IL6 antagonist binding domain of this disclosure preferentially inhibits IL6 cis- and trans-signaling. In certain embodiments, the affinity of a binding domain for IL6, IL6R, or sIL6xR complex is about the same as the affinity of gp130 for IL6xR complex—with “about the same” meaning equal or up to about 2-fold higher affinity. In certain embodiments, the affinity of the binding domain for IL6, IL6R, or IL6xR complex is higher than the affinity of gp130 for IL6xR complex by at least 2-fold, at least 3-fold, at least 4-fold, at least 5-fold, at least 6-fold, at least 7-fold, at least 8-fold, at least 9-fold, at least 10-fold, at least 15-fold, at least 20-fold, at least 25-fold, at least 50-fold, at least 100-fold, 1000-fold, or greater. For example, if the affinity of gp130 for a IL6xR complex is about 2 nM (see, e.g., Gaillard et al. (1999) Eur. Cytokine Netw. 10:337), then a binding domain having at least a 10-fold higher affinity for the IL6xR complex would have a dissociation constant (K_{d}) of about 0.2 nM or less.

[0052] In further embodiments, an IL6 antagonist binding domain of this disclosure comprises a polypeptide sequence that (a) binds to a sIL6xR complex with an affinity at least 2-fold, 10-fold, 25-fold, 50-fold, 75-fold to 100-fold, 100-fold to 1000-fold higher than for either IL6 or IL6Rα alone and (b) competes with membrane gp130 for binding to sIL6xR complex or augments soluble gp130 binding to sIL6xR complex. In further embodiments, a polypeptide binding domain of this disclosure that binds to a sIL6xR complex with an affinity at least 2-fold, 10-fold, 25-fold, 50-fold, 75-fold to 100-fold, 100-fold to 1000-fold higher than for either IL6 or IL6Rα alone may also (i) more significantly or preferentially inhibit IL6 trans-signaling over IL6 cis-signaling, (ii) not inhibit signaling of gp130 cytokine family members other than IL6, (iii) preferentially inhibit IL6 trans-signaling over IL6 cis-signaling and not detectably inhibit signaling of gp130 family cytokines other than IL6, (iv) may have two or more of these properties, or (v) may have all of these properties.

[0053] In certain embodiments, a polypeptide IL6 antagonist binding domain of this disclosure binds to a sIL6xR complex with an affinity at least 2-fold to 1000-fold higher than for either IL6 or IL6Rα alone and more significantly or preferentially inhibits IL6 trans-signaling over IL6 cis-signaling. To “preferentially inhibit IL6 trans-signaling over IL6 cis-signaling” refers to altering trans-signaling to an extent that sIL6xR activity is measurably decreased while the decrease in IL6 cis-signaling is not substantially altered (i.e., meaning inhibition is minimal, non-existent, or not measurable). For example, a biomarker for sIL6xR activity (e.g., acute phase expression of antichymotrypsin (ACT) in HepG2 cells) can be measured to detect trans-signaling inhibition. A representative assay is described by Jostock et al. (Eur. J. Biochem., 2001)—briefly, HepG2 cells can be stimulated to overexpress ACT in the presence of sIL6xR (trans-signaling) or IL6 (cis-signaling), but adding spg130 will inhibit the overexpression of ACT induced by sIL6xR while not substantially affecting IL6 induced expression. Similarly, a polypeptide binding domain of this disclosure that preferentially inhibits IL6 trans-signaling over IL6 cis-signaling will inhibit the overexpression of ACT induced by sIL6xR (i.e., inhibit trans-signaling) while not substantially affecting IL6 induced expression (i.e., not measurably decrease cis-signaling). This and other assays known in the art can be used to measure preferential inhibition of IL6 trans-signaling over IL6 cis-signaling (see, e.g., other biomarkers described in Sporri et al. (1999) Int. Immunol. 11:1053; Mihara et al. (1995) Br. J. Rheum. 34:321; Chen et al. (2004) Immun. 20:59).

[0054] In further embodiments, signaling by gp130 family cytokines other than IL6 is not substantially inhibited by binding domain polypeptides or multi-specific fusion proteins thereof of this disclosure. For example, cis- and trans-signaling by an IL6xR complex via gp130 will be inhibited, but signaling by one or more other gp130 family cytokines will be minimally affected or unaffected, such as signaling via leukemia inhibitory factor (LIF), ciliary neurotropic factor (CNTF), neuropoietin (NPN), cardiotropin like cytokine (CLC), oncostatin M (OSM), IL-11, IL-27, IL-31, cardiotrophin-1 (CT-1), or any combination thereof.

[0055] It will be appreciated by those skilled in the art that the preferred in vivo half-life of a binding domain of this disclosure is on the order of days or weeks, but while the binding domain concentration may be low, the target may be plentiful as both IL6 and sIL6 production can be quite elevated in disease states (see, e.g., Lu et al. (1993) Cytokine 5:578). Thus, in certain embodiments, a binding domain of this disclosure has a k_{OFF} of about 10⁻⁵/sec (e.g., about a day) or less. In certain embodiments, the k_{OFF} can range from about 10⁻¹/sec, about 10⁻²/sec, about 10⁻³/sec, about 10⁻⁴/sec, about 10⁻⁵/sec, about 10⁻⁶/sec, about 10⁻⁷/sec, about 10⁻⁸/sec, about 10⁻⁹/sec, about 10⁻¹°/sec, or less.

[0056] In an illustrative example, binding domains of this disclosure specific for an IL6 or IL6xR complex were identified in a Fab phage library of fragments (see Hoet et al. (2005) Nature Biotechnol. 23:344) by screening for binding to a synthetic IL6xR complex. The synthetic IL6xR complex used for this screening comprises a structure of N-IL6Rα(frag)-L1-IL6(frag)-L2-ID-C, wherein N is the amino-terminus and C is the carboxy-terminus, IL6Rα(frag) is a fragment of full length IL6Rα, IL6(frag) is a fragment of IL6, L1 and L2 are linkers, and ID is an intervening or dimerization domain, such as an immunoglobulin Fc domain.

[0057] More specifically, an IL6xR (which is a form of Hyper IL6) used to identify the binding domains specific for IL6xR complex has a structure, from amino-terminus to carboxy-terminus, as follows: (a) a central fragment of 212 amino acids from IL6Rα that is missing the first 110 amino acids of the full length protein and a carboxy-terminal portion that will depend on the isoform used (see GenBank Accession No. NP_{—}000556.1, isoform 1 or NP_{—}852004.1, isoform 2) fused to (2) a linker of G₃S that is in turn fused to (3) a 175 amino acid carboxy-terminal fragment of IL6 (i.e., missing the first 27 amino acids of the full length protein; GenBank Accession No. NP_{—}000591.1) that is in turn fused to (4) a linker that is an IgG2A hinge as set forth in SEQ ID NO:589, which is finally fused to a dimerization domain comprised of an immunoglobulin G1 (IgG1) Fc domain. In certain embodiments, the dimerization domain comprised of an IgG1 Fc domain has one or more of the following amino acids mutated (i.e., have a different amino acid at that position): leucine at position 234 (L234), leucine at position 235 (L235), glycine at position 237 (G237), glutamate at position 318 (E318), lysine at position 320 (K320), lysine at position 322 (K322), or any combination thereof (numbering according to EU). For example, any one of these amino acids can be changed to alanine 1n a further embodiment, an IgG1 Fc domain has each of L234, L235, G237, E318, K320, and K322 (according to EU numbering) mutated to an alanine (i.e., L234A, L235A, G237A, E318A, K320A, and K322A, respectively).

[0058] In one embodiment, an IL6xR complex used to identify the IL6 antagonist binding domains of this disclosure has an amino acid sequence as set forth in SEQ ID NO:606. In certain embodiments, there are provided polypeptides containing a binding domain specific for an IL6xR complex, wherein the IL6xR is a sIL6xR and has the amino acid sequence as set forth in SEQ ID NO:606. In further embodiments, polypeptides containing a binding domain specific for an IL6xR complex (1) have greater or equal affinity for an IL6xR complex than for IL6 or IL6Rα alone, or have greater affinity for IL6Rα alone or an IL6xR complex than for IL6 alone, (2) compete with membrane gp130 for binding with a sIL6xR complex or augment soluble gp130 binding to sIL6xR complex, (3) preferentially inhibit IL6 trans-signaling over IL6 cis-signaling, or (4) do not inhibit signaling of gp130 family cytokines other than IL6, (5) have any combination thereof of properties (1)-(4), or (6) have all of the properties of (1)-(4). Other exemplary IL6xR complexes that may be used to identify binding domains of the instant disclosure or used as a reference complex to measure any of the aforementioned binding properties are described, for example, in US Patent Publication Nos. 2007/0172458; 2007/0031376; and U.S. Pat. Nos. 7,198,781; 5,919,763.

[0059] In some embodiments, IL6 antagonist binding domains of this disclosure comprise V_{H} and V_{L} domains specific for an IL6, IL6R, or IL6xR complex as described herein, and preferably human IL6, human IL6R, or human IL6xR complex. In certain embodiments, the V_{H} and V_{L} domains are rodent (e.g., mouse, rat), humanized, or human. Examples of binding domains containing such V_{H} and V_{L} domains specific for IL6, IL6R, or IL6xR are set forth in SEQ ID NOS:435-496 and 373-434, respectively. In further embodiments, there are provided polypeptide binding domains specific for an IL6xR complex that bind to the IL6xR with a higher or equal affinity than either IL6 or IL6Rα alone, and either compete with membrane gp130 for binding to the sIL6xR complex or augment soluble gp130 binding to sIL6xR complex, wherein the binding domain comprises a sequence that is at least 90%, at least 91%, at least 92%, at least 93%, at least 94%, at least 95%, at least 96%, at least 97%, at least 98%, at least 99%, at least 99.5%, or at least 100% identical to an amino acid sequence of one or more light chain variable regions (V_{L}) or to one or more heavy chain variable regions (V_{H}), or both, as set forth in SEQ ID NOS:373-434 and 435-496, respectively, wherein each CDR has up to three amino acid changes (i.e., many of the changes will be in the framework regions).

[0060] In further embodiments, binding domains of this disclosure comprise V_{H} and V_{L} domains specific for an IL6xR as set forth in SEQ ID NOS:435-496 and 373-434, respectively, which are at least 80%, at least 81%, at least 82%, at least 83%, at least 84%, at least 85%, at least 86%, at least 87%, at least 88%, at least 89%, at least 90%, at least 91%, at least 92%, at least 93%, at least 94%, at least 95%, at least 96%, at least 97%, at least 98%, at least 99%, or at least 99.5% identical to the amino acid sequence of such V_{H} domain, V_{L} domain, or both, wherein each CDR has at most from zero to three amino acid changes. For example, the amino acid sequence of a V_{H} domain, V_{L} domain, or both of this disclosure can be at least 80%, at least 81%, at least 82%, at least 83%, at least 84%, at least 85%, at least 86%, at least 87%, at least 88%, at least 89%, at least 90%, at least 91%, at least 92%, at least 93%, at least 94%, at least 95%, at least 96%, at least 97%, at least 98%, at least 99%, or at least 99.5% identical to the amino acid sequence of V_{H} domain (e.g., amino acids 512 to 631), V_{L} domain (e.g., amino acids 649 to 758), or both, respectively, from an exemplary Xceptor molecule containing binding domain TRU(XT6)-1002 (SEQ ID NO:608), wherein each CDR has at most from zero to three amino acid changes.

[0061] In any of these or other embodiments described herein, the V_{L} and V_{H} domains may be arranged in either orientation and may be separated by up to about a ten amino acid linker as disclosed herein or any other amino acid sequence capable of providing a spacer function compatible with interaction of the two sub-binding domains. In certain embodiments, a linker joining the V_{H} and V_{L} domains comprises an amino acid sequence as set forth in SEQ ID NO:497-604 and 791-796, such as Linker 47 (SEQ ID NO:543) or Linker 80 (SEQ ID NO:576).

[0062] In further embodiments, IL6 antagonist binding domains of this disclosure may comprise one or more complementarity determining region (“CDR”), or multiple copies of one or more such CDRs, which have been obtained, derived, or designed from variable regions of an anti-IL6, anti-IL6R, or anti-IL6xR complex scFv or Fab fragment or from heavy or light chain variable regions thereof. Thus, a binding domain of this disclosure can comprise a single CDR3 from a variable region of an anti-IL6, anti-IL6R, or anti-IL6xR, or it can comprise multiple CDRs that can be the same or different. In certain embodiments, IL6 antagonist binding domains of this disclosure comprise V_{H} and V_{L} domains comprising framework regions and CDR1, CDR2 and CDR3 regions, wherein (a) the V_{H} domain comprises the amino acid sequence of a heavy chain CDR3 found in any one of SEQ ID NOS:435-496; or (b) the V_{L} domain comprises the amino acid sequence of a light chain CDR3 found in any one of SEQ ID NOS:373-434; or (c) the binding domain comprises a V_{H} amino acid sequence of (a) and a V_{L} amino acid sequence of (b); or the binding domain comprises a V_{H} amino acid sequence of (a) and a V_{L} amino acid sequence of (b) and wherein the V_{H} and V_{L} are found in the same reference sequence. In further embodiments, binding domains of this disclosure comprise V_{H} and V_{L} domains specific for an IL6xR complex comprising framework regions and CDR1, CDR2 and CDR3 regions, wherein (a) the V_{H} domain comprises the amino acid sequence of a heavy chain CDR1, CDR2, and CDR3 found in any one of SEQ ID NOS:435-496; or (b) the V_{L} domain comprises the amino acid sequence of a light chain CDR1, CDR2, and CDR3 found in any one of SEQ ID NOS:373-434; or (c) the binding domain comprises a V_{H} amino acid sequence of (a) and a V_{L} amino acid sequence of (b); or the binding domain comprises a V_{H} amino acid sequence of (a) and a V_{L} amino acid sequence of (b), wherein the V_{H} and V_{L} amino acid sequences are from the same reference sequence. Exemplary light and heavy chain variable domain CDRs directed against IL6, IL6R, or IL6xR are provided in SEQ ID NOS:1-187 and 787-792, and SEQ ID NOS:187-371 and 793-798, respectively.

[0063] Amino acid sequences of IL6 antagonist light chain variable regions are provided in SEQ ID NOS:373-434 and 799-804 and IL6 antagonist heavy chain variable regions are provided in SEQ ID NO:435-496 and 805-810.

[0064] In any of the embodiments described herein comprising specific CDRs against IL6, IL6R, or IL6xR, a binding domain can comprise (i) a V_{H} domain having an amino acid sequence that is at least 80%, 85%, 90%, 91%, 92%, 93%, 94%, 95%, 96%, 97%, 98%, or 99% identical to the amino acid sequence of a V_{H} domain found in any one of SEQ ID NOS:435-496 and 805-810; or (ii) a V_{L} domain having an amino acid sequence that is at least 80%, 85%, 90%, 91%, 92%, 93%, 94%, 95%, 96%, 97%, 98%, or 99% identical to the amino acid sequence of a V_{L} domain found in any one of SEQ ID NOS:373-434 and 799-804; or (iii) both a V_{H} domain of (i) and a V_{L} domain of (ii); or both a V_{H} domain of (i) and a V_{L} domain of (ii) wherein the V_{H} and V_{L} are from the same reference sequence.

[0065] In certain embodiments, a binding domain of this disclosure may be an immunoglobulin-like domain, such as an immunoglobulin scaffold. Immunoglobulin scaffolds contemplated in this disclosure include a scFv, Fab, a domain antibody, or a heavy chain-only antibody. In further embodiments, there are provided anti-IL6 or anti-IL6xR antibodies (e.g., non-human such as mouse or rat, chimeric, humanized, human) or Fab fragments or scFv fragments that have an amino acid sequence that is at least 80%, 85%, 90%, 91%, 92%, 93%, 94%, 95%, 96%, 97%, 98%, 99%, or 100% identical to the amino acid sequence of a V_{H} and V_{L} domain set in any one of SEQ ID NOS:435-496 and 805-801, and 373-434 and 799-804, respectively, which may also have one or more of the following properties: (1) have greater or equal affinity for an IL6xR complex than for IL6 or IL6Rα alone, or have greater affinity for IL6Rα alone or an IL6xR complex than for IL6 alone, (2) compete with membrane gp130 for binding with a sIL6xR complex or augment soluble gp130 binding to sIL6xR complex, (3) preferentially inhibit IL6 trans-signaling over IL6 cis-signaling, or (4) do not inhibit signaling of gp130 family cytokines other than IL6. Such antibodies, Fabs, or scFvs can be used in any of the methods described herein. In certain embodiments, the present disclosure provides polypeptides containing a binding domain that is an IL6 antagonist (i.e., can inhibit IL6 cis- and trans-signaling). In further embodiments, an IL6 antagonist according to this disclosure does not inhibit signaling of gp130 family cytokines other than IL6. Exemplary IL6 antagonists include binding domains specific for an IL6 or IL6xR, such as an immunoglobulin variable binding domain or derivative thereof (e.g., an antibody, Fab, scFv, or the like).

[0066] Alternatively, binding domains of this disclosure may be part of a scaffold other than an immunoglobulin. Other scaffolds contemplated include an A domain molecule, a fibronectin III domain, an anticalin, an ankyrin-repeat engineered binding molecule, an adnectin, a Kunitz domain, or a protein AZ domain affibody.

### RANKL Antagonists

[0067] As noted above, in certain embodiments the present disclosure provides polypeptides containing a binding region or domain that is a RANKL antagonist (i.e., can inhibit RANK signaling). Exemplary RANKL antagonists include binding domains specific for a RANKL or RANK, such as an immunoglobulin variable binding domain or derivative thereof (e.g., an antibody, Fab, scFv, or the like), or an OPG ectodomain or fragment thereof.

[0068] Osteoprotegrin (OPG, also known as OCIF) is a member of the tumor necrosis factor (TNF) receptor superfamily. OPG is a secreted, soluble protein which is initially expressed as a precursor protein having a 21 amino acid residue signal peptide. The amino-terminal half of the protein contains four cysteine-rich repeats, which is characteristic of TNF receptor superfamily members. The carboxy-terminal portion of the protein contains two death domain homologous regions. OPG is expressed in osteoblasts and tissues including heart, kidney, liver, spleen and bone marrow (see, e.g., Boyce and Xing, Arthritis Res. Ther. (2007) 9(Suppl 1):S1). The ligands for OPG are RANKL and TRAIL (TNF-related apoptosis-inducing ligand).

[0069] The OPG/RANK/RANKL system is involved in osteoclast formation. Osteoclasts are bone resorbing cells, which are critical for bone remodeling and skeletal health. RANKL binds RANK which causes downstream signaling. Activated RANK binds TRAFs (tumor necrosis factor receptor-associated factors) which in turn leads to activation of NF-κB. Seven pathways are activated by RANK-mediated signaling including inhibition of NF-κB kinase/NF-κB, c-Jun amino-terminal kinase/activator protein-1, c-myc, calcineurin/nuclear factor of activated T cells, src, MKK6/p38/MITF and extracellular signal-related kinase. Grb-2 associated binder protein 2 also binds RANK and mediates signaling. OPG functions by binding to RANKL and preventing it from associating with RANK. Therefore, OPG is a negative regulator of bone resorption.

[0070] In some embodiments, binding domains of this disclosure comprise V_{H} and V_{L} domains specific for a RANKL or RANK. In certain embodiments, the V_{H} and V_{L} domains are human. Examples of binding domains containing such V_{H} and V_{L} domains specific for RANKL, include those disclosed in U.S. Pat. No. 6,740,522.

[0071] In certain embodiments, a RANKL antagonist comprises an OPG protein (also known as TR1 or OCIF) having an amino acid sequence as set forth in GenBank Accession No. NP_{—}002537.3 (SEQ ID NO:737), or any fragment thereof that continues to function as a RANKL antagonist. In other embodiments, a RANKL antagonist comprises amino acids 22-401 of SEQ ID NO:737 (i.e., lacking the native 21 amino acid leader sequence). In further embodiments, there are provided polypeptide binding domains specific for RANKL, wherein the binding domain comprises a sequence that is at least 80%, at least 85%, at least 90%, at least 91%, at least 92%, at least 93%, at least 94%, at least 95%, at least 96%, at least 97%, at least 98%, at least 99%, at least 99.5%, or at least 100% identical to an amino acid sequence of SEQ ID NO:737 or to amino acids 22-401 of SEQ ID NO:737, wherein the polypeptide binding domain binds to RANKL and inhibits the activity thereof.

### IL7 Antagonists

[0072] As noted above, in certain embodiments the present disclosure provides polypeptides containing a binding region or domain that is an IL7 antagonist (i.e., can inhibit IL7Rα signaling). Exemplary IL7 antagonists include binding domains specific for an IL7, such as an immunoglobulin variable binding domain or derivative thereof (e.g., an antibody, Fab, scFv, or the like), or an IL7Rα ectodomain or fragment thereof.

[0073] Interleukin-7 (IL7) is a cytokine produced by fibroblastic reticular cells in the T cell zone in lymphoid organs which binds to interleukin-7 receptor (IL7R) (Palmer et al. (2008) Cell. Mol. Immun. 5:79). IL7 stimulates the proliferation of precursor B cells, thymocytes, T cell progenitors, and mature CD4⁺ and CD8⁺ T cells. Generally, IL7 functions in pro-survival and proliferative capacities and performs an immunomodulatory role in dendritic cells. The major signaling cascades activated by the IL7 system include the Jak-Stat and PI3K-Akt pathways. IL7 binding to IL7R stimulates trans-phosphorylation of receptor-bound Jak kinases. The activated Jak kinases phosphorylate tyrosine residues on the receptor, and the resultant phosphotyrosines serve as docking sites for SH2 domain proteins, including the Stat family of transcription factors. The Jak kinases then activate the recruited Stat proteins via phosphorylation.

[0074] IL7R is composed of two separate polypeptides: the IL7R alpha chain (IL7Rα) and the common gamma chain (IL7Rγc). Both proteins are members of the hematopoietin superfamily (Ouellette et al. (2003) Prot. Exp. Pur. 30:156). IL7Rα is expressed in B cells, thymocytes, T cell progenitors, mature CD4⁺ and CD8⁺ T cells, dendritic cells, and monocytes. It is expressed as a 459 amino acid precursor protein containing a 20 amino acid signal sequence, a 219 amino acid extracellular ligand binding domain, a 25 amino acid transmembrane domain, and a 195 amino acid cytoplasmic domain.

[0075] In some embodiments, binding domains of this disclosure comprise V_{H} and V_{L} domains specific for an IL7. In certain embodiments, the V_{H} and V_{L} domains are human. Examples of binding domains containing such V_{H} and V_{L} domains specific for IL7, include those disclosed, for example, in U.S. Pat. No. 5,714,585. In certain embodiments, an IL7 antagonist may be an extracellular domain (“ectodomain”) of an IL7Rα. As used herein, an IL7Rα ectodomain refers to an extracellular portion of IL7Rα, a soluble IL7Rα, an IL7Rα fibronection type II domain, or any combination thereof. In certain embodiments, an IL7 antagonist comprises an amino-terminal portion of IL7Rα, such as the first 240 amino acids of IL7Rα as set forth in GenBank Accession No. NP_{—}002176.2 (SEQ ID NO:738), or any fragment thereof that continues to function as an IL7 antagonist. In other embodiments, an IL7 antagonist comprises amino acids 21-240 or 120-230 of SEQ ID NO:738 (i.e., without the native leader sequence and the fibronection type II domain, respectively). In further embodiments, there are provided polypeptide binding domains specific for IL7, wherein the binding domain comprises a sequence that is at least 80%, at least 85%, at least 90%, at least 91%, at least 92%, at least 93%, at least 94%, at least 95%, at least 96%, at least 97%, at least 98%, at least 99%, at least 99.5%, or at least 100% identical to an amino acid sequence of SEQ ID NO:738 or to amino acids 21-240 or 120-130 of SEQ ID NO:738, wherein the polypeptide binding domain binds to IL7 and inhibits the activity thereof.

### IL17A/F Antagonists

[0076] As noted above, in certain embodiments the present disclosure provides polypeptides containing a binding region or domain that is an IL17A/F antagonist (i.e., can inhibit IL17RA, IL17RC, or IL17RA/C signaling). Exemplary IL17A/F antagonists include binding domains specific for an IL17A, IL17F or IL17A/F, such as an immunoglobulin variable binding domain or derivative thereof (e.g., an antibody, Fab, scFv, or the like), or an IL17RA, IL17RC, or IL17RA/C ectodomain or fragment thereof.

[0077] The interleukin 17 family of cytokines is produced by a distinct subpopulation of T helper cells referred to as Th17. There are six IL17 cytokines (IL17A-IL17F) and five receptors (IL17RA-IL17RE) that have been identified (Kolls and Linden, 2004, Immunity, 21:467). IL17A and IL17F share approximately 55% homology and have similar biological functions, although the activities of IL17A are believed to be at least 10-fold more potent than those of IL17F. Both IL17A and IL17F form homodimers and recent studies have indicated that IL17A and IL17F also form heterodimers with intermediate signaling potency (Wright et al. (2007) J. Biol. Chem. 282:13447; Chang et al. (2007) Cell Res. 17:435). The IL17A/IL17F heterodimer may be the dominant form of this cytokine in vivo (Shen and Gaffen (2008) Cytokine 41:91).

[0078] Interleukin 17A (IL17A; originally known as IL17; also known as CTLA8) is a potent cytokine Binding of IL17A to its receptor, IL17RA, stimulates the secretion of various proinflammatory molecules, including tumor necrosis factor-α (TNFα), interleukin 6 (IL6), interleukin 1β (IL1β) and prostaglandin E2 (PGE2) from macrophages (Jovanovic et al. (1998) J. Immunol. 160:3513). IL6 was one of the earliest defined IL17A gene targets and is used as the standard bioassay for IL17A activity. IL17A has been shown to activate IL6 synergistically with other cytokines, including IL1β, IFNγ, TNFα and IL22, although the underlying mechanism of synergy is not well understood (see, e.g., Teunissen et al. (1998) J. Invest. Dermatol. 111:645).

[0079] Interleukin 17F (IL17F; also known as ML-1) is a 17 kD secreted protein that, like IL17A, forms a disulfide-linked homodimer. IL17A and IL17F have similar biological functions, although the activities of IL17A are believed to be more potent than those of IL17F. Recent studies have indicated that IL17A and IL17F also form heterodimers with intermediate signaling potency (Wright et al. (2007) J. Biol. Chem. 282: 13447-55; Chang et al. (2007) Cell Res. 17:435). It has been suggested that the IL17A/IL17F heterodimer may be the dominant form of this cytokine in vivo (Shen & Gaffen (2008) Cytokine 41:91). While, like IL17A, IL17F is primarily expressed by activated T cells, IL17F has also been shown to be expressed by activated monocytes, activated basophils and mast cells (Kawaguchi et al. (2002) J. Immunol. 167:4430).

[0080] The receptor IL17RA is a ubiquitous type I membrane glycoprotein that has been shown to bind IL17A with an affinity of about 0.5 nM (Yao et al. (1995) Immunity 3:811), but IL17RC also binds IL17A with high affinity even though IL17RC is the cognate receptor for human IL17F (Keustner et al. (2007) J. Immunol. 179:5462). However, it has been observed that IL17RA deficiency and IL17RA antibody neutralization ablate both IL17A and IL17F function, suggesting that IL17RC alone cannot deliver an IL17A or IL17F signal in the absence of IL17RA (Toy et al. (2006) J. Immunol. 177:36; McAllister et al. (2005) J. Immunol. 175:404). Furthermore, forced expression of IL17RC in IL17RA deficient mice does not restore IL17A or IL17F function (Toy et al., 2006).

[0081] Structurally, the extracellular domain of IL17RA contains two fibronectin III-like (FN) domains (FN1 (residues 69-183) and FN2 (residues 205-282)) connected by a flexible linker. FN domains are commonly found in Type I cytokine receptors where they mediate protein-protein interactions and ligand binding. Kramer et al. identified a Pre-Ligand Assembly Domain (PLAD) located entirely within FN2 and determined that the FN2 linker encodes the IL17A binding site (Kramer et al. (2007) J. Immunol. 179:6379). In addition, a SEFIR domain is located at amino acids 378-536 of the IL17RA sequence (GenBank Accession No. NP_{—}055154.3; SEQ ID NO:739) and at amino acids 473-623 of the IL17RC sequence (GenBank Accession No. NP_{—}598920.2; SEQ ID NO:740).

[0082] In some embodiments, binding domains of this disclosure comprise V_{H} and V_{L} domains specific for an IL17A, IL17F or IL17A/F. In certain embodiments, the V_{H} and V_{L} domains are human. Examples of binding domains containing such V_{H} and V_{L} domains specific for IL17A, IL17F or IL17A/F include those disclosed, for example, in PCT Patent Application Publication Nos. WO 2006/088833, WO 2007/117749, WO 2008/047134, WO 2008/054603; and US Patent Application Publication No. 2007/0212362. An IL17R-Fc fusion protein and its use to decrease the severity of disease in a murine model of rheumatoid arthritis are described in U.S. Pat. No. 6,973,919.

[0083] In certain embodiments, an IL17A/F antagonist may be an extracellular domain (“ectodomain”) of an IL17RA, IL17RC or IL17RA/C. As used herein, an IL17RA, IL17RC or IL17RA/C ectodomain refers to an extracellular portion of IL17RA, IL17RC or IL17RA/C, a soluble IL17RA, IL17RC or IL17RA/C, one or more fibronectin-like domains, one or more pre-ligand assembly domains (PLAD), one or more SEFIR domains, or any combination thereof. In certain embodiments, an IL17A/F antagonist comprises an amino-terminal portion of IL17RA, such as the first 307 amino acids of IL17RA as set forth in GenBank Accession No. NP_{—}055154.3 (SEQ ID NO:739), or any fragment thereof that continues to function as an IL17A/F antagonist. In other embodiments, an IL17A/F antagonist comprises amino acids 32-307 of SEQ ID NO:739 (i.e., without the leader sequence) or SEQ ID NO:816. In further embodiments, an IL17A/F antagonist comprises an amino-terminal portion of IL17RC, such as the first 539 amino acids of IL17RC as set forth in GenBank Accession No. NP_{—}703191.1 (SEQ ID NO:740), SEQ ID NO:817, or any fragment thereof that continues to function as an IL17A/F antagonist. In other embodiments, an IL17A/F antagonist comprises amino acids 21-539 of SEQ ID NO:740 (i.e., without the leader sequence). In yet further embodiments, there are provided polypeptide binding domains specific for IL17A/F, wherein the binding domain comprises a sequence that is at least 80%, at least 85%, at least 90%, at least 91%, at least 92%, at least 93%, at least 94%, at least 95%, at least 96%, at least 97%, at least 98%, at least 99%, at least 99.5%, or at least 100% identical to an amino acid sequence of SEQ ID NO:739, amino acids 32-307 of SEQ ID NO:739, an amino acid sequence of SEQ ID NO:816, an amino acid sequence of SEQ ID NO:740, amino acids 21-539 of SEQ ID NO:740 or an amino acid sequence of SEQ ID NO:817, wherein the polypeptide binding domain binds to IL17A/F and inhibits the activity thereof.

### TWEAK Antagonists

[0084] As noted above, in certain embodiments the present disclosure provides polypeptides containing a binding region or domain that is a TWEAK antagonist (i.e., can inhibit TWEAKR signaling). Exemplary TWEAK antagonists include binding domains specific for a TWEAK, such as an immunoglobulin variable binding domain or derivative thereof (e.g., an antibody, Fab, scFv, or the like), or a TWEAKR ectodomain or fragment thereof.

[0085] TWEAK is a cytokine that belongs to the tumor necrosis factor (TNF) ligand family and regulates multiple cellular responses including pro-inflammatory activity, angiogenesis and cell proliferation. TWEAK is a type II-transmembrane protein that is cleaved to generate a soluble cytokine with biological activity. The position of various domains within the TWEAK protein is shown, for example, in US Published Patent Application No. 2007/0280940. TWEAK has overlapping signaling functions with TNF, but displays a much wider tissue distribution. TWEAK can induce apoptosis via multiple pathways of cell death in a cell type-specific manner and has also been found to promote proliferation and migration of endothelial cells, and thus acts as a regulator of angiogenesis.

[0086] In some embodiments, binding domains of this disclosure comprise V_{H} and V_{L} domains specific for a TWEAK. In certain embodiments, the V_{H} and V_{L} domains are human. Examples of binding domains containing such V_{H} and V_{L} domains specific for TWEAK, include those disclosed, for example, in U.S. Pat. No. 7,169,387, and those disclosed in US Patent Publication No. 2008/0279853 as SEQ ID NOS:3-7, which sequences are hereby incorporated by reference. Monoclonal antibodies that block TWEAK have been shown to be effective in a mouse collagen-induced arthritis (CIA) model (Kamata et al. (2006) J. Immunol. 177:6433; Perper et al. (2006) J. Immunol. 177:2610).

[0087] In certain embodiments, a TWEAK antagonist may be an extracellular domain (“ectodomain”) of a TWEAKR (also known as FN14). As used herein, a TWEAKR ectodomain refers to an extracellular portion of TWEAKR, a soluble TWEAKR, or any combination thereof. In certain embodiments, a TWEAK antagonist comprises an amino-terminal portion of TWEAKR, such as the first 70 amino acids of TWEAKR as set forth in GenBank Accession No. NP_{—}057723.1 (SEQ ID NO:741), or any fragment thereof that continues to function as a TWEAK antagonist. In other embodiments, a TWEAK antagonist comprises amino acids 28-70 of SEQ ID NO:741 (i.e., without the leader sequence). In yet further embodiments, a TWEAK antagonist comprises a sequence that is at least 80%, at least 85%, at least 90%, at least 91%, at least 92%, at least 93%, at least 94%, at least 95%, at least 96%, at least 97%, at least 98%, at least 99%, at least 99.5%, or at least 100% identical to an amino acid sequence of SEQ ID NO:741, or amino acids 28-70 of SEQ ID NO:741, wherein the antagonist binds to TWEAK and inhibits the activity thereof.

[0088] The ability of binding proteins or fusion proteins described herein to reduce binding of TWEAK to TWEAKR may be determined using assays known to those of skill in the art including those described in US Patent Application Publication Nos. 2007/0280940 and 2008/0279853.

### CSF2 Antagonists

[0089] As noted above, in certain embodiments the present disclosure provides polypeptides containing a binding region or domain that is a CSF2 antagonist (i.e., can inhibit CSF2Rα signaling). Exemplary CSF2 antagonists include binding domains specific for a CSF2, such as an immunoglobulin variable binding domain or derivative thereof (e.g., an antibody, Fab, scFv, or the like), or a CSF2Rα ectodomain or fragment thereof.

[0090] CSF2 is a cytokine that functions as a white blood cell growth factor. It is produced by a number of cell types including lymphocytes, monocytes, endothelial cells, fibroblasts and some malignant cells. In addition to stimulating growth and differentiation of hemopoietic precursor cells, CSF2 has a variety of effects on cells of the immune system expressing the CSF2 receptor. The most important of these functions is the activation of monocytes, macrophages and granulocytes in several immune and inflammatory processes. Mature CSF2 is a monomeric protein of 127 amino acids with two glycosylation sites and the active form is found as an extracellular homodimer.

[0091] The actions of CSF2 are mediated by its receptor CSF2R (also known as GMR, GMCSFR, or Cluster of Differentiation 116 (CD116)). The receptor is normally expressed on the cell surface of myeloid cells and endothelial cells, but not on lymphocytes. The native receptor is a heterodimer composed of at least two subunits; an alpha chain (CSF2Rα) and a beta chain ((3c). The alpha subunit imparts ligand specificity and binds CSF2 with nanomolar affinity (Gearing et al. (1989) EMBO J. 12:3667; Gasson et al. (1986) Proc. Nat'l. Acad. Sci. USA 83:669). The beta subunit is also present in the receptors for interleukin-3 and interleukin-5 receptor complexes, and is involved in signal transduction. Association of the beta and alpha subunits with CSF2 leads to the formation of a complex with picomolar binding affinity (Hayashida et al. (1990) Proc. Nat'l. Acad. Sci. USA 87:9655) and results in receptor activation.

[0092] The binding domains on CSF2 for the receptor have been mapped (Brown et al. (1994) Eur. J. Biochem. 225:873; Shanafelt et al. (1991) J. Biol. Chem. 266: 13804; Shanafelt et al. (1991) EMBO J. 10:4105; Lopez et al. (1986) J. Clin. Invest. 78:1220). In addition, McClure et al. have demonstrated that one molecule of CSF2 associates with one alpha subunit and two beta subunits to form the ternary complex (McClure et al. (2003) Blood 101:1308-1315). Formation of the CSF2 receptor complex leads to the activation of complex signaling cascades involving molecules of the JAWSTAT families, Shc, Ras, Raf, the MAP kinases, NFκB and phosphatidylinositol-3-kinase, finally leading to transcription of c-myc, c-fos and c-jun.

[0093] In some embodiments, binding domains of this disclosure comprise V_{H} and V_{L} domains specific for a CSF2. In certain embodiments, the V_{H} and V_{L} domains are human. Examples of binding domains containing such V_{H} and V_{L} domains specific for CSF2 include those disclosed, for example, in U.S. Pat. No. 7,381,801. Additional V_{H} and V_{L} domains specific for CSF2 include those disclosed in US Patent Publication No. 2009/0053213 as SEQ ID NO:11-20, 49-52, and 31-40, 58-61, respectively, which sequences are hereby specifically incorporated by reference. Neutralizing anti-CSF2 antibodies have been shown to be effective in a murine collagen-induced arthritis model (Cook et al. (2001) Arthritis Res. 3:293-298) and in a murine asthma model (Yamashita et al. (2002) Cell Immunol. 219:92).

[0094] In certain embodiments, a CSF2 antagonist may be an extracellular domain (“ectodomain”) of a CSF2Rα. As used herein, a CSF2Rα ectodomain refers to an extracellular portion of CSF2Rα, a soluble CSF2Rα, or any combination thereof. In certain embodiments, a CSF2 antagonist comprises an amino-terminal portion of CSF2Rα, such as the first 323 amino acids of CSF2Rα as set forth in GenBank Accession No. NP_{—}006131.2 (SEQ ID NO:742), or any fragment thereof that continues to function as a CSF2 antagonist. In other embodiments, a CSF2 antagonist comprises amino acids 23-323 of SEQ ID NO:742 (i.e., without the native leader sequence). In yet further embodiments, a CSF2 antagonist comprises a sequence that is at least 80%, at least 85%, at least 90%, at least 91%, at least 92%, at least 93%, at least 94%, at least 95%, at least 96%, at least 97%, at least 98%, at least 99%, at least 99.5%, or at least 100% identical to an amino acid sequence of SEQ ID NO:742, or amino acids 23-323 of SEQ ID NO:742, wherein the antagonist binds to CSF2 and inhibits the activity thereof.

[0095] The ability of binding proteins and/or fusion proteins described herein to reduce binding of CSF2 to its receptor may be determined using assays known to those of skill in the art including those described in PCT Patent Application Publication No. WO 2006/122797 and US Patent Application Publication No. 2009/0053213.

### IGF1/2 Antagonists

[0096] As noted above, in certain embodiments the present disclosure provides polypeptides containing a binding region or domain that is an IGF1 or IGF2 antagonist (i.e., can inhibit IGF1 or IGF2 signaling). Exemplary IGF1 or IGF2 antagonists include binding domains specific for IGF1 or IGF2, such as an immunoglobulin variable binding domain or derivative thereof (e.g., an antibody, Fab, scFv, or the like), or an IGF1R or IGFBP ectodomain or sub-domain thereof.

[0097] The insulin-like growth factors (IGFs), comprise a family of peptides that play important roles in mammalian growth and development. Insulin-like growth factor 1 (IGF1) is a secreted protein that has the following features: disulfide bonds (amino acids 54-96, 66-109, 95-100); D peptide domain (amino acids 111-118); carboxyl-terminal propeptide domain (E peptide) (amino acids 119-153); insulin chain A-like domain (amino acids 90-110); insulin chain B-like domain (amino acids 49-77); insulin connecting C peptide-like domain (amino acids 78-89); propeptide domain (amino acids 22-48); and signal sequence domain (amino acids 1-21).

[0098] IGF1 is synthesized in multiple tissues including liver, skeletal muscle, bone and cartilage. The changes in blood concentrations of IGF1 reflect changes in its synthesis and secretion from the liver, which accounts for 80% of the total serum IGF1 in experimental animals. The remainder of the IGF1 is synthesized in the periphery, usually by connective tissue cell types, such as stromal cells that are present in most tissues. IGF1 that is synthesized in the periphery can function to regulate cell growth by autocrine and paracrine mechanisms. Within these tissues, the newly synthesized and secreted IGF1 can bind to receptors that are present either on the connective tissue cells themselves and stimulate growth (autocrine), or it can bind to receptors on adjacent cell types (often epithelial cell types) that do not actually synthesize IGF1 but are stimulated to grow by locally secreted IGF1 (paracrine) (Clemmons, 2007, Nat Rev Drug Discov. 6(10):821-33). IGF1 synthesis is controlled by several factors, including the human pituitary growth hormone (GH, also known as somatotropin). IGF2 concentrations are high during fetal growth but are less GH-dependent in adult life compared with IGF1.

[0099] IGF1 enhances growth and/or survival of cells in a variety of tissues including musculoskeletal systems, liver, kidney, intestines, nervous system tissues, heart, and lung. IGF1 also has an important role in promoting cell growth and consequently IGF1 inhibition is being pursued as a potential adjunctive measure for treating atherosclerosis. Inhibiting IGF1 action has been proposed as a specific treatment either for potentiating the effects of other forms of anticancer therapies or for directly inhibiting tumor cell growth.

[0100] Like IGF1, IGF2 acts through IGF1R. IGF2 is an important autocrine growth factor in tumors due to its mitogenic and antiapoptotic functions (Kaneda et al., 2005, Cancer Res 65(24): 11236-11240). Increased expression of IGF2 is found frequently in a wide variety of malignancies, including colorectal, liver, esophageal and adrenocortical cancer, as well as sarcomas. Paracrine signaling by IGF2 also plays a role in tumors including breast cancers, as abundant expression of IGF2 is found in stromal fibroblasts surrounding malignant breast epithelial cells.

[0101] Insulin-like growth factor 1 receptor (IGF1R) is a tetramer of two alpha and two beta chains linked by disulfide bonds. Cleavage of a precursor generates the alpha and beta subunits. IGF1R is related to the protein kinase superfamily, the tyrosine protein kinase family, and the insulin receptor subfamily. It contains three fibronectin type-III domains, and one protein kinase domain (Lawrence et al., 2007, Current Opinion in Structural Biology 17:699). The alpha chains contribute to the formation of the ligand-binding domain, while the beta chain carries a kinase domain. It is a single-pass type I membrane protein and is expressed in a variety of tissues.

[0102] The kinase domain has tyrosine-protein kinase activity, which is necessary for the activation of the IGF1- or IGF2-stimulated downstream signaling cascade. Auto-phosphorylation activates the kinase activity. IGF1R interacts with PIK3R1 and with the PTB/PID domains of IRS1 and SHC1 in vitro when autophosphorylated on tyrosine residues in the cytoplasmic domain of the beta subunit. IGF1R plays a critical role in transformation events. It is highly over-expressed in most malignant tissues where it functions as an anti-apoptotic agent by enhancing cell survival. Cells lacking this receptor cannot be transformed by most oncogenes, with the exception of v-Src.

[0103] The insulin-like growth factor-binding protein (IGFBP) family comprises six soluble proteins (IGFBP1-6) of approximately 250 residues that bind to IGFs with nanomolar affinities. Because of their sequence homology, IGFBPs are assumed to share a common overall fold and are expected to have closely related IGF-binding determinants. Each IGFBP can be divided into three distinct domains of approximately equal lengths: highly conserved cysteine-rich N and C domains and a central linker domain unique to each IGFBP species. Both the N and C domains participate in the binding to IGFs, although the specific roles of each of these domains in IGF binding have not been decisively determined. The C-terminal domain may be responsible for preferences of IGFBPs for one species of IGF over the other; the C-terminal domain is also involved in regulation of the IGF-binding affinity through interaction with extracellular matrix components and is most probably engaged in mediating IGF1-independent actions. The central linker domain is the least conserved region and has never been cited as part of the IGF-binding site for any IGFBP. This domain is the site of posttranslational modifications, specific proteolysis, and the acid-labile subunit and extracellular matrix associations known for IGFBPs. Proteolytic cleavage in this domain is believed to produce lower-affinity N- and C-terminal fragments that cannot compete with IGF receptors for IGFs, and, thus, the proteolysis is assumed to be the predominant mechanism for IGF release from IGFBPs. However, recent studies indicate that the resulting N- and C-terminal fragments still can inhibit IGF activity and have functional properties that differ from those of the intact proteins (Sitar et al. (2006) Proc. Nat'l. Acad. Sci. USA. 103(35):13028).

[0104] IGF-binding proteins are secreted proteins that prolong the half-life of the IGFs and have been shown to either inhibit or stimulate the growth promoting effects of the IGFs on cell culture. They alter the interaction of IGFs with their cell surface receptors and also promote cell migration. They bind equally well to IGF1 and IGF2. The C-terminal domains of all IGFBPs show sequence homology with thyroglobulin type-1 domains and share common elements of secondary structure: an α-helix and a 3- to 4-β-stranded β-sheet. The core of the molecule is connected by the consensus three disulfide pairings, has conserved Tyr/Phe amino acids and has the QC, CWCV motifs. These essential features are preserved in CBP1, CBP4, and CBP-6, the structures of C domains solved so far, although there are significant variations in detail. For example, CBP4 has helix a2, whereas the corresponding residues in CBP1 form a short beta-strand seen in other structures of the thyroglobulin type-1 domain superfamily. This particular region of CBPs has high sequence diversity and is involved in the IGF complex formation and thus may perform the role of an affinity regulator.

[0105] Inhibition of IGF/IGF-receptor binding interferes with cell growth and represents a strategy for the development of IGFBPs and variants as natural IGF antagonists in many common diseases that arise from disregulation of the IGF system, including diabetes, atherosclerosis, and cancer.

[0106] In some embodiments, binding domains of this disclosure comprise V_{H} and V_{L} domains specific for IGF1 or IGF2. In certain embodiments, the V_{H} and V_{L} domains are human. Binding domains of this disclosure may also, or alternatively, comprise an IGF1R ectodomain of Genbank Accession no. NP_{—}000866.1 (SEQ ID NO:746) or a sub-domain thereof or an amino acid of SEQ ID NO:818, or an IGFBP ectodomain of Genbank Accession no. NP_{—}000587.1 (IGFBP1; SEQ ID NO:747), amino acids 490-723 of SEQ ID NO:804, NP_{—}000588.2 (IGFBP2; SEQ ID NO:748), NP_{—}001013416.1 (IGFBP3 isoform a; SEQ ID NO:749), NP_{—}000589.2 (IGFBP3 isoform b; SEQ ID NO:750), NP_{—}001543.2 (IGFBP4; SEQ ID NO:751), NP_{—}000590.1 (IGFBP5; SEQ ID NO:752) or NP_{—}002169.1 (IGFBP6; SEQ ID NO:753) or a sub-domain thereof. In yet further embodiments, an IGF1 or IGF2 antagonist comprises a sequence that is at least 80%, at least 85%, at least 90%, at least 91%, at least 92%, at least 93%, at least 94%, at least 95%, at least 96%, at least 97%, at least 98%, at least 99%, at least 99.5%, or at least 100% identical to an amino acid sequence of SEQ ID NO:746-753 or 818, wherein the antagonist inhibits the activity of at least one or IGF1 and IGF2.

### BLyS/APRIL Antagonists

[0107] As noted above, in certain embodiments the present disclosure provides polypeptides containing a binding region or domain that is a BLyS/APRIL antagonist (i.e., can inhibit TACI signaling). Exemplary BLyS/APRIL antagonists include binding domains specific for a BLyS/APRIL, such as an immunoglobulin variable binding domain or derivative thereof (e.g., an antibody, Fab, scFv, or the like), or a TACI ectodomain or fragment thereof.

[0108] BLyS (also known as BAFF, TALL-1, THANK, TNFSF13B or zTNF4) and a proliferation-inducing ligand (APRIL or TNFSF13) are cytokines that belong to the tumor necrosis factor (TNF) ligand superfamily. BLyS and APRIL stimulate B cell maturation, proliferation and survival (Gross et al. (2000) Nature 404:995; Gross et al. (2001) Immunity 15:289), and may be involved in the persistence of autoimmune diseases involving B cells.

[0109] BLyS acts on B cells by binding to three members of the TNF receptor superfamily—TACI (also known as TNFRSF13B or CD267), BCMA and BR3 (also known as BAFF-R). BCMA binds BLyS with weaker affinity, while APRIL binds only to TACI and BCMA (see, e.g., Bossen and Schneider (2006) Seminars in Immunol. 18:263). TACI appears to function to both up-regulate T cell-independent immune responses and to down-regulate B cell activation and expansion (Yan (2001) Nat. Immunol. 2:638; MacKay and Schneider (2008) Cytokine Growth Factor Rev. 9:263).

[0110] In some embodiments, binding domains of this disclosure comprise V_{H} and V_{L} domains specific for a BLyS/APRIL. In certain embodiments, the V_{H} and V_{L} domains are human. Examples of binding domains containing such V_{H} and V_{L} domains specific for BLyS/APRIL include those disclosed, for example, in US Patent Application Publication No. 2003/0223996 or U.S. Pat. No. 7,189,820. A TACI-immunoglobulin fusion protein (atacicept) has been used in the clinic to treat patients with rheumatoid arthritis (Tak et al. (2001) Arthritis Rheum. 58:61) or systemic lupus erythematosus (Dall'Era et al. (2007) Arthritis Rheum. 56:4142).

[0111] In certain embodiments, a BLyS/APRIL antagonist may be an extracellular domain (“ectodomain”) of a TACI. As used herein, a TACI ectodomain refers to an extracellular portion of TACI, a soluble TACI, a fragment containing one or more cysteine rich domains (CRDs), or any combination thereof. In certain embodiments, a BLyS/APRIL antagonist comprises an amino-terminal portion of TACI, such as the first 166 amino acids of TACI as set forth in GenBank Accession No. NP_{—}036584.1 (SEQ ID NO:743), or any fragment thereof that continues to function as a BLyS/APRIL antagonist. In other embodiments, a BLyS/APRIL antagonist comprises amino acids 21-166 of SEQ ID NO:743 (i.e., without the native leader sequence). In yet further embodiments, a BLyS/APRIL antagonist comprises a sequence that is at least 80%, at least 85%, at least 90%, at least 91%, at least 92%, at least 93%, at least 94%, at least 95%, at least 96%, at least 97%, at least 98%, at least 99%, at least 99.5%, or at least 100% identical to an amino acid sequence of SEQ ID NO:743, or amino acids 21-166 of SEQ ID NO:743, wherein the antagonist binds to CSF2 and inhibits the activity thereof.

[0112] The ability of binding proteins and/or fusion proteins described herein to reduce binding of BLyS/APRIL to its receptor may be determined using assays known to those of skill in the art including those described in US Patent Application Publication No. 2003/0223996; 2005/0043516 and in U.S. Pat. No. 7,189,820.

### IL10 Agonists

[0113] As noted above, in certain embodiments the present disclosure provides polypeptides containing a binding region or domain that is an IL10 agonist (i.e., can increase IL10 signaling). In some embodiments, the IL10 agonist binding domain is an IL10 or a IL10Fc, or a functional sub-domain thereof. In other embodiments, the IL10 agonist binding domain is a single chain binding protein, such as an scFv, that specifically binds to IL10R1 or IL10R2.

[0114] IL10 (Genbank Accession no. NP_{—}000563.1; SEQ ID NO:754) is a member of a cytokine superfamily that share an alpha-helical structure. Although no empirical evidence exists, it has been suggested that all the family members possess six alpha-helices (Fickenscher, H. et al., (2002) Trends Immunol. 23:89). IL10 has four cysteines, only one of which is conserved among family members. Since IL10 demonstrates a V-shaped fold that contributes to its dimerization, it appears that disulfide bonds are not critical to this structure. Amino acid identity of family members to IL10 ranges from 20% (IL-19) to 28% (IL-20) (Dumouter et al., (2002) Eur. Cytokine Netw. 13:5).

[0115] IL10 was first described as a Th2 cytokine in mice that inhibited IFN-α and GM-CSF cytokine production by Th1 cells (Moore et al., 2001, Annu Rev. Immunol. 19:683; Fiorentino et al., (1989) J. Exp. Med. 170:2081). Human IL10 is 178 amino acids in length with an 18 amino acid signal sequence and a 160 amino acid mature segment. Its molecular weight is approximately 18 kDa (monomer). Human IL10 contains no potential N-linked glycosylation site and is not glycosylated (Dumouter et al., (2002) Eur. Cytokine Netw. 13:5; Vieira et al., (1991) Proc. Nat'l. Acad. Sci. USA 88:1172). It contains four cysteine residues that form two intrachain disulfide bonds. Helices A to D of one monomer noncovalently interact with helices E and F of a second monomer, forming a noncovalent V-shaped homodimer. Functional areas have been mapped on the IL10 molecule. In the N-terminus, pre-helix A residues #1-9 are involved in mast cell proliferation, while in the C-terminus, helix F residues #152-160 mediate leukocyte secretion and chemotaxis.

[0116] Cells known to express IL10 include CD8+ T cells, microglia, CD14+ (but not CD16+) monocytes, Th2 CD4+ cells (mice), keratinocytes, hepatic stellate cells, Th1 and Th2 CD4+ T cells (human), melanoma cells, activated macrophages, NK cells, dendritic cells, B cells (CDS+ and CD19+) and eosinophils. On T cells, the initial observation of IL10 inhibition of IFN-gamma production is now suggested to be an indirect effect mediated by accessory cells. Additional effects on T cells, however, include: IL10 induced CD8+ T cell chemotaxis, an inhibition of CD4+ T cell chemotaxis towards IL-8, suppression of IL-2 production following activation, an inhibition of T cell apoptosis via Bc1-2 up-regulation, and an interruption of T cell proliferation following low antigen exposure accompanied by CD28 costimulation (Akdis et al., (2001) Immunology 103:131).

[0117] On B cells, IL10 has a number of related, yet distinct functions. In conjunction with TGFβ and CD40L, IL10 induces IgA production in naïve (IgD+) B cells. It is believed that TGFβ/CD40L promotes class switching while IL10 initiates differentiation and growth. When TGFβ is not present, IL10 cooperates with CD40L in inducing IgG1 and IgG3 (human), and thus may be a direct switch factor for IgG subtypes. Interestingly, IL10 has divergent effects on IL-4 induced IgE secretion. If IL10 is present at the time of IL-4 induced class switching, it reverses the effect; if it is present after IgE commitment, it augments IgE secretion. Finally, CD27/CD70 interaction in the presence of IL10 promotes plasma cell formation from memory B cells (Agematsu et al. (1998) Blood 91:173).

[0118] Mast cells and NK cells are also impacted by IL10. On mast cells, IL10 induces histamine release while blocking GM-CSF and TNF-α release. This effect may be autocrine as IL10 is known to be released by mast cells in rat. As evidence of its pleiotrophic nature, IL10 has the opposite effects on NK cells. Rather than blocking TNF-α and GM-CSF production, IL10 actually promotes this function on NK cells. In addition, it potentiates IL-2 induced NK cell proliferation and facilitates IFN-γ secretion in NK cells primed by IL-18. In concert with both IL-12 and/or IL-18, IL10 potentiates NK cell cytotoxicity (Cai et al., 1999, Eur. J. Immunol. 29:2658).

[0119] IL10 has a pronounced anti-inflammatory impact on neutrophils. It inhibits the secretion of the chemokines MIP-1α, MIP-1β and IL-8, and blocks production of the proinflammatory mediators IL-1β and TNF-α. In addition, it decreases the ability of neutrophils to produce superoxide, and as a result interferes with PMN-mediated antibody-dependent cellular cytotoxicity. It also blocks IL-8 and fMLP-induced chemotaxis, possibly via CXCR1 (Vicioso et al., (1998) Eur. Cytokine Netw. 9:247).

[0120] On dendritic cells (DCs), IL10 generally exhibits immunosuppressive effects. It appears to promote CD14+ macrophage differentiation at the expense of DCs. IL10 seems to decrease the ability of DCs to stimulate T cells, particularly for Th1 type cells. Relative to MHC-II expression, it can be down-regulated, unchanged, or up-regulated (Sharma et al., (1999) J. Immunol. 163:5020). With respect to CD80 and CD86, IL10 will either up-regulate or down-regulate its expression. B7-2/CD86 plays a key role in T cell activation. For this molecule, IL10 is involved in both up-regulation and down-regulation. Perhaps the most significant modulation, however, occurs with CD40 (IL10 seems to reduce its expression). At the regional level, IL10 may block immunostimulation by inhibiting Langerhans cell migration in response to proinflammatory cytokines. Alternatively, IL10 blocks an inflammation-induced DC maturation step that normally involves CCR1, CCR2 and CCR5 down-regulation and CCR7 up-regulation. This blockage, with retention of CCR1, CCR2 and CCR5, results in a failure of DCs to migrate to regional nodes. The result is an immobile DC that will not stimulate T cells but will bind (and clear) proinflammatory chemokines without responding to them (D-Amico et al., (2000) Nat. Immunol. 1:387).

[0121] On monocytes, IL10 has a number of documented effects. For example, IL10 reduces cell surface MHC-II expression and also inhibits IL-12 production following stimulation. While it promotes a monocyte to macrophage transition in conjunction with M-CSF, the phenotype of the macrophage is not clear (i.e. CD16+/cytotoxic vs. CD16−). IL10 also reduces monocyte GM-CSF secretion and IL-8 production, while promoting IL-lra release (Gesser et al., (1997) Proc. Natl. Acad. Sci. USA 94:14620). Hyaluronectin, a connective tissue component, is now known to be secreted by monocytes in response to IL10. This may have some importance in cell migration, particularly tumor cell metastases, where hyaluronectin is known to interrupt cell migration through extracellular space (Gesser et al., (1997) Proc. Nat'l. Acad. Sci. USA 94: 14620).

[0122] Fusion proteins of IL10 with either murine or macaque Fc regions (referred to as IL10Fc) have been shown to inhibit macrophage function and prolong pancreatic islet xenograft survival (Feng et al. (1999) Transplantation 68:1775; Asiedu et al. (2007) Cytokine 40:183), as well as reduce septic shock in a murine model (Zheng et al. (1995) J. Immunol. 154:5590).

[0123] Human IL10R1 is a 90-110 kDa, single-pass type I transmembrane glycoprotein that is expressed on a limited number of cell types (Liu et al., 1994, J. Immunol. 152:1821), with weak expression being seen in pancreas, skeletal muscle, brain, heart and kidney, and intermediate levels of expression being seen in placenta, lung, and liver. Monocytes, B-cells, large granular lymphocytes, and T-cells express high levels of IL1 OR1 (Liu et al., 1994, J. Immunol. 152:1821). The expressed protein is a 578 amino acid protein that contains a 21 amino acid signal peptide, a 215 amino acid extracellular region, a 25 amino acid transmembrane segment, and a 317 amino acid cytoplasmic domain. There are two FNIII motifs within the extracellular region and a STAT3 docking site plus a JAK1 association region within the cytoplasmic domain (Kotenko et al., 2000 Oncogene 19: 2557; Kotenko et al., 1997, EMBO J. 16:5894). IL10R1 binds human IL10 with a Kd of 200 pM.

[0124] In some embodiments, binding domains of this disclosure comprise V_{L} and V_{H} domains specific for an IL10R1 or IL10R2 as described herein. In certain embodiments, the V_{L} and V_{H} domains are human. The V_{L} and V_{H} domains may be arranged in either orientation and may be separated by up to about a 30 amino acid linker as disclosed herein or any other amino acid sequence capable of providing a spacer function compatible with interaction of the two sub-binding domains. In certain embodiments, a linker joining the V_{L} and V_{H} domains comprises an amino acid sequence as set forth in SEQ ID NO:497-604 and 791-796. Multi-specific binding domains can have at least two specific sub-binding domains, by analogy to camelid antibody organization, or at least four specific sub-binding domains, by analogy to the more conventional mammalian antibody organization of paired V_{L} and V_{H} chains. In further embodiments, binding domains specific for IL10R1 or IL10R2 of this disclosure may comprise one or more complementarity determining region (“CDR”), or multiple copies of one or more such CDRs, which have been obtained, derived, or designed from variable regions of an anti-IL10R1 or IL10R2 scFv or Fab fragment or from heavy or light chain variable regions thereof. Thus, a binding domain of this disclosure can comprise a single CDR from a variable region of an anti-IL10R1 or -IL10R2, or it can comprise multiple CDRs that can be the same or different. In certain embodiments, binding domains of this disclosure comprise V_{L} and V_{H} domains specific for an IL10R1 or IL10R2 comprising framework regions and CDR1, CDR2 and CDR3 regions.

[0125] In certain embodiments, an IL10 agonist may be an extracellular domain (“ectodomain”) of IL10. As used herein, an IL10 ectodomain refers to an extracellular portion of IL10, a soluble IL10, or any combination thereof. In yet further embodiments, an IL10 agonist comprises a sequence that is at least 80%, at least 85%, at least 90%, at least 91%, at least 92%, at least 93%, at least 94%, at least 95%, at least 96%, at least 97%, at least 98%, at least 99%, at least 99.5%, or at least 100% identical to an amino acid sequence of SEQ ID NO:754, amino acids 19-178 of SEQ ID NO:754, or an extracellular portion thereof, wherein the agonist binds to IL10R1 or IL10R2 and increases IL10 activity.

### Multi-Specific Fusion Proteins

[0126] The present disclosure provides multi-specific fusion proteins comprising a domain that is an antagonist of TNF-α (“TNF-α antagonist domain”) and a domain that binds a ligand other than a TNF-α (“heterologous binding domain”), such as IL6, IL6R, IL6xR complex, RANKL, IL7, IL17A/F, TWEAK, CSF2, IGF1, IGF2, BLyS/APRIL or IL10R. It is contemplated that a TNF-α antagonist domain may be at the amino-terminus and a heterologous binding domain at the carboxy-terminus of a fusion protein, or the heterologous binding domain may be at the amino-terminus and the TNF-α antagonist may be at the carboxy-terminus. As set forth herein, the binding domains of this disclosure may be fused to each end of an intervening domain (e.g., an immunoglobulin constant region or sub-region thereof, preferably CH2 and CH3 domains of IgG, such as IgG1). Furthermore, the two or more binding domains may be each joined to an intervening domain via a linker known in the art or as described herein.

[0127] As used herein, an “intervening domain” refers to an amino acid sequence that simply functions as a scaffold for one or more binding domains so that the fusion protein will exist primarily (e.g., 50% or more of a population of fusion proteins) or substantially (e.g., 90% or more of a population of fusion proteins) as a single chain polypeptide in a composition. For example, certain intervening domains can have a structural function (e.g., spacing, flexibility, rigidity) or biological function (e.g., an increased half-life in plasma, such as in human blood). Exemplary intervening domains that can increase half-life of the fusion proteins of this disclosure in plasma include albumin, transferrin, a scaffold domain that binds a serum protein, or the like, or fragments thereof.

[0128] In certain preferred embodiments, the intervening domain contained in a multi-specific fusion protein of this disclosure is a “dimerization domain,” which refers to an amino acid sequence that is capable of promoting the association of at least two single chain polypeptides or proteins via non-covalent or covalent interactions, such as by hydrogen bonding, electrostatic interactions, Van der Waal's forces, salt bridges, disulfide bonds, hydrophobic interactions, or the like, or any combination thereof. Exemplary dimerization domains include immunoglobulin heavy chain constant regions or sub-regions, such as an Fc region comprising IgG (e.g., IgG1, IgG2, IgG3, IgG4) CH2 and CH3 domains, preferably IgG1 CH2 and CH3 domains. It should be understood that a dimerization domain will preferably promote the formation of dimers, but will be capable of forming higher order multimer complexes (such as trimers, tetramers, pentamers, hexamers, septamers, octamers, etc.).

[0129] A “constant sub-region” is a term defined herein to refer to a preferred peptide, polypeptide, or protein sequence that corresponds to or is derived from part or all of one or more immunoglobulin constant region domains, but not all constant region domains found in a source antibody. In some embodiments, the constant region domains of a fusion protein of this disclosure lack or have minimal effector functions of antibody-dependent cell-mediated cytotoxicity (ADCC), antibody-dependent cell-mediated phagocytosis (ADCP), or complement activation and complement-dependent cytotoxicity (CDC), while retaining the ability to bind some F_{c} receptors (such as F_{C}Rn binding) and retaining a relatively long half life in vivo. In certain embodiments, a binding domain of this disclosure is fused to a human IgG1 constant region or sub-region, wherein the IgG1 constant region or sub-region has one or more of the following amino acids mutated: leucine at position 234 (L234), leucine at position 235 (L235), glycine at position 237 (G237), glutamate at position 318 (E318), lysine at position 320 (K320), lysine at position 322 (K322), or any combination thereof (EU numbering).

[0130] Methods are known in the art for making mutations inside or outside an Fc domain that can alter Fc interactions with Fc receptors (CD16, CD32, CD64, CD89, FcεR1, FcRn) or with the complement component Clq (see, e.g., U.S. Pat. No. 5,624,821; Presta (2002) Curr. Pharma. Biotechnol. 3:237). Particular embodiments of this disclosure include compositions comprising immunoglobulin or fusion proteins that have a constant region or sub-region from human IgG wherein binding to FcRn and protein A are preserved and wherein the Fc domain no longer interacts or minimally interacts with other Fc receptors or C1q. For example, a binding domain of this disclosure can be fused to a human IgG1 constant region or sub-region wherein the asparagine at position 297 (N297 under the EU numbering) has been mutated to another amino acid to reduce or eliminate glycosylation at this site and, therefore, abrogate efficient Fc binding to FcγR and C1q. Another exemplary mutation is a P331S, which knocks out Clq binding but does not affect Fc binding.

[0131] In further embodiments, an immunoglobulin Fc region may have an altered glycosylation pattern relative to an immunoglobulin referent sequence. For example, any of a variety of genetic techniques may be employed to alter one or more particular amino acid residues that form a glycosylation site (see Co et al. (1993) Mol. Immunol. 30:1361; Jacquemon et al. (2006) J. Thromb. Haemost. 4:1047; Schuster et al. (2005) Cancer Res. 65:7934; Warnock et al. (2005) Biotechnol. Bioeng. 92:831). Alternatively, the host cells in which fusion proteins of this disclosure are produced may be engineered to produce an altered glycosylation pattern. One method known in the art, for example, provides altered glycosylation in the form of bisected, non-fucosylated variants that increase ADCC. The variants result from expression in a host cell containing an oligosaccharide-modifying enzyme. Alternatively, the Potelligent® technology of BioWa/Kyowa Hakko is contemplated to reduce the fucose content of glycosylated molecules according to this disclosure. In one known method, a CHO host cell for recombinant immunoglobulin production is provided that modifies the glycosylation pattern of the immunoglobulin Fc region, through production of GDP-fucose.

[0132] Alternatively, chemical techniques are used to alter the glycosylation pattern of fusion proteins of this disclosure. For example, a variety of glycosidase and/or mannosidase inhibitors provide one or more of desired effects of increasing ADCC activity, increasing Fc receptor binding, and altering glycosylation pattern. In certain embodiment, cells expressing a multispecific fusion protein of the instant disclosure (containing a TNF-α antagonist domain linked to a IL6, RANKL, IL7, IL17A/F, TWEAK, CSF2, IGF1, IGF2 or BLyS/APRIL antagonist or to an IL10 agonist) are grown in a culture medium comprising a carbohydrate modifier at a concentration that increases the ADCC of immunoglycoprotein molecules produced by said host cell, wherein said carbohydrate modifier is at a concentration of less than 800 μM. In a preferred embodiment, the cells expressing these multispecific fusion proteins are grown in a culture medium comprising castanospermine or kifunensine, more preferably castanospermine at a concentration of 100-800 μM, such as 100 μM, 200 μM, 300 μM, 400 μM, 500 μM, 600 μM, 700 μM, or 800 μM. Methods for altering glycosylation with a carbohydrate modifier such as castanospermine are provided in US Patent Application Publication No. 2009/0041756 or PCT Publication No. WO 2008/052030.

[0133] In another embodiment, the immunoglobulin Fc region may have amino acid modifications that affect binding to effector cell Fc receptors. These modifications can be made using any technique known in the art, such as the approach disclosed in Presta et al. (2001) Biochem. Soc. Trans. 30:487. In another approach, the Xencor XmAb™ technology is available to engineer constant sub-regions corresponding to Fc domains to enhance cell killing effector function (see Lazar et al. (2006) Proc. Nat'l. Acad. Sci. (USA) 103:4005). Using this approach, for example, one can generate constant sub-regions with improved specificity and binding for FCγR, thereby enhancing cell killing effector function.

[0134] In still further embodiments, a constant region or sub-region can optionally increase plasma half-life or placental transfer in comparison to a corresponding fusion protein lacking such an intervening domain. In certain embodiments, the extended plasma half-life of a fusion protein of this disclosure is at least two, at least three, at least four, at least five, at least ten, at least 12, at least 18, at least 20, at least 24, at least 30, at least 36, at least 40, at least 48 hours, at least several days, at least a week, at least two weeks, at least several weeks, at least a month, at least two months, at least several months, or more in a human.

[0135] A constant sub-region may include part or all of any of the following domains: a C_{H2} domain and a C_{H3} domain (IgA, IgD, IgG), or a C_{H3} domain and a C_{H4} domain (IgE, IgM). A constant sub-region as defined herein, therefore, can refer to a polypeptide that corresponds to a portion of an immunoglobulin constant region. The constant sub-region may comprise a C_{H2} domain and a C_{H3} domain derived from the same, or different, immunoglobulins, antibody isotypes, or allelic variants. In some embodiments, the C_{H3} domain is truncated and comprises a carboxy-terminal sequence listed in PCT Publication No. WO 2007/146968) as SEQ ID NOS:366-371, which sequences are hereby incorporated by reference. In certain embodiments, a constant sub-region of a polypeptide of this disclosure has a C_{H2} domain and C_{H3} domain, which may optionally have an amino-terminal linker, a carboxy-terminal linker, or a linker at both ends.

[0136] A “linker” is a peptide that joins or links other peptides or polypeptides, such as a linker of about 2 to about 150 amino acids. In fusion proteins of this disclosure, a linker can join an intervening domain (e.g., an immunoglobulin-derived constant sub-region) to a binding domain or a linker can join two variable regions of a binding domain. For example, a linker can be an amino acid sequence obtained, derived, or designed from an antibody hinge region sequence, a sequence linking a binding domain to a receptor, or a sequence linking a binding domain to a cell surface transmembrane region or membrane anchor. In some embodiments, a linker can have at least one cysteine capable of participating in at least one disulfide bond under physiological conditions or other standard peptide conditions (e.g., peptide purification conditions, conditions for peptide storage). In certain embodiments, a linker corresponding or similar to an immunoglobulin hinge peptide retains a cysteine that corresponds to the hinge cysteine disposed toward the amino-terminus of that hinge. In further embodiments, a linker is from an IgG1 or IgG2A hinge and has one cysteine or two cysteines corresponding to hinge cysteines. In certain embodiments, one or more disulfide bonds are formed as inter-chain disulfide bonds between intervening domains. In other embodiments, fusion proteins of this disclosure can have an intervening domain fused directly to a binding domain (i.e., absent a linker or hinge). In some embodiments, the intervening domain is a dimerization domain.

[0137] The intervening or dimerization domain of multi-specific fusion proteins of this disclosure may be connected to one or more terminal binding domains by a peptide linker. In addition to providing a spacing function, a linker can provide flexibility or rigidity suitable for properly orienting the one or more binding domains of a fusion protein, both within the fusion protein and between or among the fusion proteins and their target(s). Further, a linker can support expression of a full-length fusion protein and stability of the purified protein both in vitro and in vivo following administration to a subject in need thereof, such as a human, and is preferably non-immunogenic or poorly immunogenic in those same subjects. In certain embodiments, a linker of an intervening or a dimerization domain of multi-specific fusion proteins of this disclosure may comprise part or all of a human immunoglobulin hinge.

[0138] Additionally, a binding domain may comprise a V_{H} and a V_{L} domain, and these variable region domains may be combined by a linker. Exemplary variable region binding domain linkers include those belonging to the (GlyₙSer) family, such as (Gly₃Ser)ₙ(Gly₄Ser)₁, (Gly₃Ser)₁(Gly₄Ser)ₙ, (Gly₃Ser)ₙ(Gly₄Ser)ₙ, or (Gly₄Ser)ₙ, wherein n is an integer of 1 to 5 (see, e.g., Linkers 22, 29, 46, 89, 90 and 116 corresponding to SEQ ID NOS:518, 525, 542, 585, 586 and 603, respectively). In preferred embodiments, these (GlyₙSer)-based linkers are used to link variable domains and are not used to link a binding domain to an intervening domain.

[0139] Exemplary linkers that can be used to join an intervening domain (e.g., an immunoglobulin-derived constant sub-region) to a binding domain or to join two variable regions of a binding domain are listed in SEQ ID NO:497-604 and 791-796.

[0140] Linkers contemplated in this disclosure include, for example, peptides derived from any inter-domain region of an immunoglobulin superfamily member (e.g., an antibody hinge region) or a stalk region of C-type lectins, a family of type II membrane proteins. These linkers range in length from about two to about 150 amino acids, or about two to about 40 amino acids, or about eight to about 20 amino acids, preferably about ten to about 60 amino acids, more preferably about 10 to about 30 amino acids, and most preferably about 15 to about 25 amino acids. For example, Linker 1 (SEQ ID NO:497) is two amino acids in length and Linker 116 (SEQ ID NO:560) is 36 amino acids in length.

[0141] Beyond general length considerations, a linker suitable for use in the fusion proteins of this disclosure includes an antibody hinge region selected from an IgG hinge, IgA hinge, IgD hinge, IgE hinge, or variants thereof. In certain embodiments, a linker may be an antibody hinge region (upper and core region) selected from human IgG1, human IgG2, human IgG3, human IgG4, or fragments or variants thereof. As used herein, a linker that is an “immunoglobulin hinge region” refers to the amino acids found between the carboxyl end of CH1 and the amino terminal end of CH2 (for IgG, IgA, and IgD) or the amino terminal end of CH3 (for IgE and IgM). A “wild type immunoglobulin hinge region,” as used herein, refers to a naturally occurring amino acid sequence interposed between and connecting the CH1 and CH2 regions (for IgG, IgA, and IgD) or interposed between and connecting the CH2 and CH3 regions (for IgE and IgM) found in the heavy chain of an antibody. In preferred embodiments, the wild type immunoglobulin hinge region sequences are human.

[0142] According to crystallographic studies, an IgG hinge domain can be functionally and structurally subdivided into three regions: the upper hinge region, the core or middle hinge region, and the lower hinge region (Shin et al., Immunological Reviews 130:87 (1992)). Exemplary upper hinge regions include EPKSCDKTHT (SEQ ID NO:819) as found in IgG1, ERKCCVE (SEQ ID NO:820) as found in IgG2, ELKTPLGDTT HT (SEQ ID NO:821) or EPKSCDTPPP (SEQ ID NO:822) as found in IgG3, and ESKYGPP (SEQ ID NO:823) as found in IgG4. Exemplary middle hinge regions include CPPCP (SEQ ID NO:834) as found in IgG1 and IgG2, CPRCP (SEQ ID NO:824) as found in IgG3, and CPSCP (SEQ ID NO:825) as found in IgG4. While IgG1, IgG2, and IgG4 antibodies each appear to have a single upper and middle hinge, IgG3 has four in tandem—one of ELKTPLGDTT HTCPRCP (SEQ ID NO:826) and three of EPKSCDTPPP CPRCP (SEQ ID NO:827).

[0143] IgA and IgD antibodies appear to lack an IgG-like core region, and IgD appears to have two upper hinge regions in tandem (see SEQ ID NOS:828 and 829). Exemplary wild type upper hinge regions found in IgA1 and IgA2 antibodies are set forth in SEQ ID NOS:830 and 831.

[0144] IgE and IgM antibodies, in contrast, instead of a typical hinge region have a CH2 region with hinge-like properties. Exemplary wild-type CH2 upper hinge-like sequences of IgE and IgM are set forth in SEQ ID NO:832 (VCSRDFTPPT VKILQSSSDG GGHFPPTIQL LCLVSGYTPG TINITWLEDG QVMDVDLSTA STTQEGELAS TQSELTLSQK HWLSDRTYTC QVTYQGHTFE DSTKKCA) and SEQ ID NO:833 (VIAELPPKVS VFVPPRDGFF GNPRKSKLIC QATGFSPRQI QVSWLREGKQ VGSGVTTDQV QAEAKESGPT TYKVTSTLTI KESDWLGQSM FTCRVDHRGL TFQQNASSMC VP), respectively.

[0145] An “altered wild type immunoglobulin hinge region” or “altered immunoglobulin hinge region” refers to (a) a wild type immunoglobulin hinge region with up to 30% amino acid changes (e.g., up to 25%, 20%, 15%, 10%, or 5% amino acid substitutions or deletions), (b) a portion of a wild type immunoglobulin hinge region that is at least 10 amino acids (e.g., at least 12, 13, 14 or 15 amino acids) in length with up to 30% amino acid changes (e.g., up to 25%, 20%, 15%, 10%, or 5% amino acid substitutions or deletions), or (c) a portion of a wild type immunoglobulin hinge region that comprises the core hinge region (which portion may be 4, 5, 6, 7, 8, 9, 10, 11, 12, 13, 14, or 15, or at least 4, 5, 6, 7, 8, 9, 10, 11, 12, 13, 14, or 15 amino acids in length). In certain embodiments, one or more cysteine residues in a wild type immunoglobulin hinge region may be substituted by one or more other amino acid residues (e.g., one or more serine residues). An altered immunoglobulin hinge region may alternatively or additionally have a proline residue of a wild type immunoglobulin hinge region substituted by another amino acid residue (e.g., a serine residue).

[0146] Alternative hinge and linker sequences that can be used as connecting regions may be crafted from portions of cell surface receptors that connect IgV-like or IgC-like domains. Regions between IgV-like domains where the cell surface receptor contains multiple IgV-like domains in tandem and between IgC-like domains where the cell surface receptor contains multiple tandem IgC-like regions could also be used as connecting regions or linker peptides. In certain embodiments, hinge and linker sequences are from five to 60 amino acids long, and may be primarily flexible, but may also provide more rigid characteristics, and may contain primarily an α-helical structure with minimal β-sheet structure. Preferably, sequences are stable in plasma and serum and are resistant to proteolytic cleavage. In some embodiments, sequences may contain a naturally occurring or added motif such as CPPC that confers the capacity to form a disulfide bond or multiple disulfide bonds to stabilize the C-terminus of the molecule. In other embodiments, sequences may contain one or more glycosylation sites. Examples of hinge and linker sequences include interdomain regions between the IgV-like and IgC-like or between the IgC-like or IgV-like domains of CD2, CD4, CD22, CD33, CD48, CD58, CD66, CD80, CD86, CD96, CD150, CD166, and CD244. Alternative hinges may also be crafted from disulfide-containing regions of Type II receptors from non-immunoglobulin superfamily members such as CD69, CD72 and CD161.

[0147] In some embodiments, a hinge linker has a single cysteine residue for formation of an interchain disulfide bond. In other embodiments, a hinge linker has two cysteine residues for formation of interchain disulfide bonds. In further embodiments, a hinge linker is derived from an immunoglobulin interdomain region (e.g., an antibody hinge region) or a Type II C-type lectin stalk region (derived from a Type II membrane protein; see, e.g., exemplary lectin stalk region sequences set forth in of PCT Application Publication No. WO 2007/146968, such as SEQ ID NOS:111, 113, 115, 117, 119, 121, 123, 125, 127, 129, 131, 133, 135, 149, 151, 153, 155, 157, 159, 161, 163, 165, 167, 169, 231, 233, 235, 237, 239, 241, 243, 245, 247, 249, 251, 253, 255, 257, 259, 261, 263, 265, 267, 269, 271, 273, 275, 277, 279, 281, 287, 289, 297, 305, 307, 309-311, 313-331, 346, 373-377, 380, or 381 from that publication, which sequences are herein incorporated by reference).

[0148] In one aspect, exemplary multi-specific fusion proteins containing a TNF-α antagonist as described herein will also contain at least one additional binding region or domain that is specific for a target other than TNF-α, such as an IL6, RANKL, IL7, IL17A/F, TWEAK, CSF2, IGF1, IGF2 or BLyS/APRIL antagonist, or an IL10 agonist. For example, a multi-specific fusion protein of this disclosure has a TNF-α antagonist domain linked to an IL6, RANKL, IL7, IL17A/F, TWEAK, CSF2, IGF1, IGF2 or BLyS/APRIL antagonist domain or an IL10 agonist domain by an intervening domain. In certain embodiments, a multi-specific fusion protein comprises a first and second binding domain, a first and second linker, and an intervening domain, wherein one end of the intervening domain is fused via the first linker to a first binding domain that is a TNF-α antagonist (e.g., a TNFR ectodomain, an anti-TNFR, an anti-TNF-α) and at the other end is fused via the second linker to a different binding domain, such as an IL6, RANKL, IL7, IL17A/F, TWEAK, CSF2, IGF1, IGF2 or BLyS/APRIL antagonist or an IL10 agonist.

[0149] In certain embodiments, the first linker and second linker of a multi-specific fusion protein of this disclosure are each independently selected from, for example, SEQ ID NO:497-604 and 791-796. For example, the first or second linker can be Linker 102 (SEQ ID NO:589), 47 (SEQ ID NO:543), 80 (SEQ ID NO:576), or any combination thereof. In further examples, one linker is Linker 102 (SEQ ID NO:589) and the other linker is Linker 47 (SEQ ID NO:543), or one linker is Linker 102 (SEQ ID NO:589) and the other linker is Linker 80 (SEQ ID NO:576). In further examples, binding domains of this disclosure that comprise V_{H} and V_{L} domains, such as those specific for IL6, IL6R, IL6xR, RANKL, IL7, IL17A/F, TWEAK, CSF2, IGF1, IGF2, BLyS/APRIL or IL10, TNFR ectodomain, or TNF-α, can have a further (third) linker between the V_{H} and V_{L} domains, such as Linker 46 (SEQ ID NO:542). In any of these embodiments, the linkers may be flanked by one to five additional junction amino acids, which may simply be a result of creating such a recombinant molecule (e.g., use of a particular restriction enzyme site to join nucleic acid molecules may result in the insertion of one to several amino acids), or for purposes of this disclosure may be considered a part of any particular linker core sequence.

[0150] In further embodiments, the intervening domain of a multi-specific fusion protein of this disclosure is comprised of an immunoglobulin constant region or sub-region (preferably CH2CH3 of IgG, IgA, or IgD; or CH3CH4 of IgE or IgM), wherein the intervening domain is disposed between a TNF-α antagonist domain and an IL6, RANKL, IL7, IL17A/F, TWEAK, CSF2, IGF1, IGF2 or BLyS/APRIL antagonist binding domain or an IL10 agonist binding domain. In certain embodiments, the intervening domain of a multi-specific fusion protein of this disclosure has a TNF-α antagonist at the amino-terminus and an IL6, RANKL, IL7, IL17A/F, TWEAK, CSF2, IGF1, IGF2 or BLyS/APRIL antagonist binding domain or an IL10 agonist binding domain at the carboxy-terminus. In other embodiments, the intervening domain of a multi-specific fusion protein of this disclosure has an IL6, RANKL, IL7, IL17A/F, TWEAK, CSF2, IGF1, IGF2 or BLyS/APRIL antagonist binding domain, or an IL10 agonist binding domain, at the amino-terminus and a TNF-α antagonist at the carboxy-terminus. In further embodiments, the immunoglobulin constant region or sub-region includes CH2 and CH3 domains of immunoglobulin G1 (IgG1). In related embodiments, the IgG1 CH2 and CH3 domains have one or more of the following amino acids mutated (i.e., have a different amino acid at that position): leucine at position 234 (L234), leucine at position 235 (L235), glycine at position 237 (G237), glutamate at position 318 (E318), lysine at position 320 (K320), lysine at position 322 (K322), or any combination thereof (EU numbering). For example, any one of these amino acids can be changed to alanine 1n a further embodiment, according to EU numbering, the CH2 domain has each of L234, L235, G237, E318, K320 and K322 mutated to an alanine (i.e., L234A, L235A, G237A, E318, K320, and K322, respectively.

[0151] In some embodiments, a multi-specific fusion protein of this disclosure has a TNF-α antagonist that comprises a TNFR extracellular domain or sub-domain, one or more TNFR CRD domains (such as CRD2 and CRD3), or TNF-α-specific antibody-derived binding domains (analogous to the IL6, IL6R, or IL6xR complex-specific antibody-derived binding domain described herein). In some embodiments, a TNF-α antagonist is an ectodomain of TNFR1 or TNFR2. In certain embodiments, a TNF-α antagonist comprises an amino-terminal portion of TNFR2 (also known as p75, TNFRSF1B), such as the first 257 amino acids of as set forth in GenBank Accession No. NP_{—}001057.1 (SEQ ID NO:671). In other embodiments, a TNF-α antagonist comprises amino acids 23-257 of SEQ ID NO:671 (i.e., without the native leader sequence). In preferred embodiments, a TNF-α antagonist comprises a fragment of TNFR2 (e.g., an ectodomain), such amino acids 23-163 of SEQ ID NO:671 or amino acids 23-185 of SEQ ID NO:671 or amino acids 23-235 of SEQ ID NO:671. In other preferred embodiments, a TNF-α antagonist comprises a derivative of a TNFR2 fragment, such amino acids 23-163 of SEQ ID NO:671 with a deletion of amino acid glutamine at position 109 or amino acids 23-185 of SEQ ID NO:671 with a deletion of amino acid glutamine at position 109 and a deletion of amino acid proline at position 109 or amino acids 23-235 of SEQ ID NO:671 with a deletion of amino acid glutamine at position 109, a deletion of amino acid proline at position 109, and an substitution of amino acid aspartate at position 235 (to, for example, a threonine, alanine, serine, or glutamate). In further embodiments, a TNF-α antagonist comprises an amino-terminal portion of TNFR1 (also known as p55, TNFRSF1A), such as the first 211 amino acids of as set forth in GenBank Accession No. NP_{—}001056.1 (SEQ ID NO:672). In other embodiments, a TNF-α antagonist comprises amino acids 31-211 of SEQ ID NO:672 (i.e., without the native leader sequence).

[0152] In further embodiments, a multi-specific fusion protein of this disclosure has a TNF-α antagonist binding domain and an IL6 antagonist binding domain that binds with higher affinity to IL6xR than to either IL6 or IL6Rα alone and competes with sIL6xR complex binding to mgp130 or enhances sgp130 binding to sIL6xR complex. In certain embodiments, a binding domain specific for an IL6xR complex comprises (i) a V_{H} domain having an amino acid sequence that is at least 80%, 85%, 90%, 91%, 92%, 93%, 94%, 95%, 96%, 97%, 98%, 99% or 100% identical to the amino acid sequence of a V_{H} domain found in any one of SEQ ID NOS:435-496 and 805-810; or (ii) a V_{L} domain having an amino acid sequence that is at least 80%, 85%, 90%, 91%, 92%, 93%, 94%, 95%, 96%, 97%, 98%, 99% or 100% identical to the amino acid sequence of a V_{L} domain found in any one of SEQ ID NOS:373-434 and 799-804; or (iii) both a V_{H} domain of (i) and a V_{L} domain of (ii); or both a V_{H} domain of (i) and a V_{L} domain of (ii) wherein the V_{H} and V_{L} are from the same reference sequence. In one embodiment, such V_{H} and V_{L} domains can form exemplary binding domain TRUE-1002 (see SEQ ID NOS:374 and 436, respectively). In certain embodiments, a multi-specific fusion protein comprising the IL6 antagonist binding domain measurably inhibits IL6 cis- and trans-signaling, and, optionally, does not inhibit signaling of gp130 family cytokines other than IL6.

[0153] In yet further embodiments, an IL6 antagonist binding domain, which binds to the IL6xR with a higher affinity than IL6 or IL6Rα or either IL6 or IL6Rα alone, and competes with gp130 for binding to the sIL6xR complex or enhances sgp130 binding to sIL6xR complex, comprises V_{H} and V_{L} domains comprising framework regions and CDR1, CDR2 and CDR3 regions, wherein (a) the V_{H} domain comprises the amino acid sequence of a heavy chain CDR1, CDR2, and CDR3 found in any one of SEQ ID NOS:435-496 and 805-810; or (b) the V_{L} domain comprises the amino acid sequence of a light chain CDR1, CDR2, and CDR3 found in any one of SEQ ID NOS:373-434 and 799-804; or (c) the binding domain comprises a V_{H} amino acid sequence of (a) and a V_{L} amino acid sequence of (b); or the binding domain comprises a V_{H} amino acid sequence of (a) and a V_{L} amino acid sequence of (b), wherein the V_{H} and V_{L} amino acid sequences are from the same reference sequence. The V_{L} and V_{H} domains of these multi-specific fusion proteins may be arranged in either orientation and may be separated by a 5-30 amino acid linker as disclosed herein. In certain embodiments, a linker joining the V_{H} and V_{L} domains comprises an amino acid sequence of Linker 47 (SEQ ID NO:543) or Linker 80 (SEQ ID NO:576) In certain embodiments, a multi-specific fusion protein comprising the IL6 antagonist binding domain measurably inhibits IL6 cis- and trans-signaling, preferably trans-signaling and, optionally, does not inhibit signaling of gp130 family cytokines other than IL6.

[0154] Exemplary structures of such multi-specific fusion proteins, referred to herein as Xceptor molecules, include N-BD-X-ED-C, N-ED-X-BD-C, N-ED 1-X-ED2-C, wherein BD is an immunoglobulin-like or immunoglobulin variable region binding domain, X is an intervening domain, and ED is a receptor ectodomain, semaphorin domain, or the like. In some constructs, X can comprise an immunoglobulin constant region or sub-region disposed between the first and second binding domains. In some embodiments, a multi-specific fusion protein of this disclosure has an intervening domain (X) comprising, from amino-terminus to carboxy-terminus, a structure as follows: -L1-X-L2-, wherein L1 and L2 are each independently a linker comprising from two to about 150 amino acids; and X is an immunoglobulin constant region region or sub-region (preferably CH2CH3 of IgG1). In further embodiments, the multi-specific fusion protein will have an intervening domain that is albumin, transferrin, or another serum protein binding protein, wherein the fusion protein remains primarily or substantially as a single chain polypeptide in a composition. In still further embodiments, a multi-specific fusion protein of this disclosure has the following structure: N-BD1-X-L2-BD2-C, wherein N and C represent the amino-terminus and carboxy-terminus, respectively; BD1 is a TNF-α antagonist that is at least about 90% identical to an TNFR ectodomain; —X— is -L1-CH2CH3-, wherein L1 is an IgG1 hinge, optionally mutated by substituting the first cysteine and wherein —CH2CH3- is the CH2CH3 region of an IgG1Fc domain, optionally mutated to eliminate FcγRI-III interaction while retaining FcRn interaction; L2 is a non-(G₄S)-based linker selected from SEQ ID NO:497-604 and 791-796; and BD2 is an IL6, RANKL, IL7, IL17A/F, TWEAK, CSF2, IGF1, IGF2 or BLys/APRIL antagonist binding domain or an IL10 agonist binding domain as described herein.

[0155] In particular embodiments, a multi-specific xceptor fusion protein has (a) a TNF-α antagonist comprising an amino acid sequence at least 80% to 100% identical to a sequence as set forth in SEQ ID NO:671 or 672 or a contiguous fragment of about 140 to about 215 amino acids as set forth in SEQ ID NO:671 or 672, and (b) an IL6 antagonist, which binds to the IL6xR with a higher affinity than 116, IL6Rα or either IL6 or IL6Rα alone and competes with mgp130 for binding to the sIL6xR complex or enhances binding of sgp130 with sIL6xR, comprising a heavy chain variable region with CDR1, CD2 and CDR3 amino acid sequences at least 80% to 100% identical to sequences set forth in SEQ ID NOS:435-496 and 805-810, respectively, and a light chain variable region with CDR1, CDR2, and CDR3 amino acid sequences at least 80% to 100% identical to sequences set forth in SEQ ID NOS:373-434 and 799-804, respectively, wherein, from amino-terminus to carboxy-terminus or from carboxy-terminus to amino-terminus, (i) a TNF-α antagonist of (a) or an IL6 antagonist of (b) is fused to a first linker, (ii) the first linker is fused to an immunoglobulin heavy chain constant region of CH2 and CH3 comprising amino acids 275 to 489 of SEQ ID NO:608, (iii) the CH2CH3 constant region polypeptide is fused to a second linker, and (iv) the second linker is fused to a TNF-α antagonist of (a) or an IL6 antagonist of (b). In certain embodiments, the first linker is Linker 47 (SEQ ID NO:543) or Linker 80 (SEQ ID NO:576), the second linker is Linker 102 (SEQ ID NO:589), and a further (third) linker between the IL6 antagonist V_{H} and V_{L} domains is Linker 46 (SEQ ID NO:542).

[0156] In still further embodiments, a multi-specific fusion protein of this disclosure has an amino acid sequence at least 80%, 85%, 90%, 91%, 92%, 93%, 94%, 95%, 96%, 97%, 98%, 99%, or 100% identical to a sequence set forth in any one of SEQ ID NOS:607-668, with or without a leader peptide (i.e., the first 23 amino acids found in these sequences). In further embodiments, a multi-specific fusion protein of this disclosure has a TNF-α antagonist comprising amino acids 23-257, 23-163, 23-185, or 23-235 of SEQ ID NO:671 and an IL6 antagonist, which binds to the IL6xR complex with a higher affinity than IL6, IL6Rα or either IL6 or IL6Rα alone and competes with mgp130 for binding to the sIL6xR complex or enhances binding of sgp130 with sIL6xR, comprising a V_{L} of SEQ ID NO:374 joined to a V_{H} of SEQ ID NO:436 via Linker 46 (SEQ ID NO:542), wherein the TNF-α antagonist is joined to the amino-terminus of an intervening domain comprising an immunoglobulin heavy chain constant region of CH2 and CH3 comprising amino acids 275 to 489 of SEQ ID NO:608 via Linker 47 (SEQ ID NO:543) and the IL6 antagonist is joined to the carboxy-terminus of the intervening domain via Linker 102 (SEQ ID NO:589). In one embodiment, the multi-specific fusion protein has an amino acid sequence as set forth in SEQ ID NO:608.

[0157] In other embodiments, a multi-specific xceptor fusion protein has (a) a TNF-α antagonist comprising an amino acid sequence at least 80% to 100% identical to a sequence as set forth in SEQ ID NO:671 or 672 or a contiguous fragment of about 140 to about 215 amino acids as set forth in SEQ ID NO:671 or 672, and (b) a TWEAK antagonist binding domain comprising an amino acid sequence at least 80% to 100% identical to SEQ ID NO:741, wherein, from amino-terminus to carboxy-terminus or from carboxy-terminus to amino-terminus, (i) a TNF-α antagonist of (a) or a TWEAK antagonist of (b) is fused to a first linker, (ii) the first linker is fused to an immunoglobulin heavy chain constant region of CH2 and CH3 comprising amino acids 275 to 489 of SEQ ID NO:798, (iii) the CH2CH3 constant region polypeptide is fused to a second linker, and (iv) the second linker is fused to a TNF-α antagonist of (a) or a TWEAK antagonist of (b). In certain embodiments, the first linker is Linker 47 (SEQ ID NO:543), and the second linker is Linker 175 (SEQ ID NO:791). In one embodiment, the multi-specific fusion protein has an amino acid sequence as set forth in SEQ ID NO:798 (corresponding nucleic acid sequence provided in SEQ ID NO:805).

[0158] In other embodiments, a multi-specific xceptor fusion protein has (a) a TNF-α antagonist comprising an amino acid sequence at least 80% to 100% identical to a sequence as set forth in SEQ ID NO:671 or 672 or a contiguous fragment of about 140 to about 215 amino acids as set forth in SEQ ID NO:671 or 672, and (b) a RANKL antagonist binding domain comprising an amino acid sequence at least 80% to 100% identical to SEQ ID NO:737, wherein, from amino-terminus to carboxy-terminus or from carboxy-terminus to amino-terminus, (i) a TNF-α antagonist of (a) or a RANKL antagonist of (b) is fused to a first linker, (ii) the first linker is fused to an immunoglobulin heavy chain constant region of CH2 and CH3 comprising amino acids 253-468 of SEQ ID NO:799, (iii) the CH2CH3 constant region polypeptide is fused to a second linker, and (iv) the second linker is fused to a TNF-α antagonist of (a) or a RANKL antagonist of (b). In certain embodiments, the first linker is Linker 47 (SEQ ID NO:543), and the second linker is Linker 175 (SEQ ID NO:791). In one embodiment, the multi-specific fusion protein has an amino acid sequence as set forth in SEQ ID NO:799 (corresponding nucleic acid sequence provided in SEQ ID NO:806).

[0159] In other embodiments, a multi-specific xceptor fusion protein has (a) a TNF-α antagonist comprising an amino acid sequence at least 80% to 100% identical to a sequence as set forth in SEQ ID NO:671 or 672 or a contiguous fragment of about 140 to about 215 amino acids as set forth in SEQ ID NO:671 or 672, and (b) an IGF antagonist binding domain comprising an amino acid sequence at least 80% to 100% identical to SEQ ID NO:818 or 746, wherein, from amino-terminus to carboxy-terminus or from carboxy-terminus to amino-terminus, (i) a TNF-α antagonist of (a) or an IGF antagonist of (b) is fused to a first linker, (ii) the first linker is fused to an immunoglobulin heavy chain constant region of CH2 and CH3 comprising amino acids 253-468 of SEQ ID NO:800, (iii) the CH2CH3 constant region polypeptide is fused to a second linker, and (iv) the second linker is fused to a TNF-α antagonist of (a) or an IGF antagonist of (b). In certain embodiments, the first linker is Linker 47 (SEQ ID NO:543), and the second linker is Linker 175 (SEQ ID NO:791). In one embodiment, the multi-specific fusion protein has an amino acid sequence as set forth in SEQ ID NO:800 (corresponding nucleic acid sequence provided in SEQ ID NO:807).

[0160] In other embodiments, a multi-specific xceptor fusion protein has (a) a TNF-α antagonist comprising an amino acid sequence at least 80% to 100% identical to a sequence as set forth in SEQ ID NO:671 or 672 or a contiguous fragment of about 140 to about 215 amino acids as set forth in SEQ ID NO:671 or 672, and (b) an IL7 antagonist binding domain comprising an amino acid sequence at least 80% to 100% identical to SEQ ID NO:738, wherein, from amino-terminus to carboxy-terminus or from carboxy-terminus to amino-terminus, (i) a TNF-α antagonist of (a) or an IL7 antagonist of (b) is fused to a first linker, (ii) the first linker is fused to an immunoglobulin heavy chain constant region of CH2 and CH3 comprising amino acids 253-468 of SEQ ID NO:801, (iii) the CH2CH3 constant region polypeptide is fused to a second linker, and (iv) the second linker is fused to a TNF-α antagonist of (a) or an IL7 antagonist of (b). In certain embodiments, the first linker is Linker 47 (SEQ ID NO:543), and the second linker is Linker 175 (SEQ ID NO:791). In one embodiment, the multi-specific fusion protein has an amino acid sequence as set forth in SEQ ID NO:801 (corresponding nucleic acid sequence provided in SEQ ID NO:808).

[0161] In other embodiments, a multi-specific xceptor fusion protein has (a) a TNF-α antagonist comprising an amino acid sequence at least 80% to 100% identical to a sequence as set forth in SEQ ID NO:671 or 672 or a contiguous fragment of about 140 to about 215 amino acids as set forth in SEQ ID NO:671 or 672, and (b) an IL17 antagonist binding domain comprising an amino acid sequence at least 80% to 100% identical to SEQ ID NO:739, 740, 816 or 817, wherein, from amino-terminus to carboxy-terminus or from carboxy-terminus to amino-terminus, (i) a TNF-α antagonist of (a) or an IL17 antagonist of (b) is fused to a first linker, (ii) the first linker is fused to an immunoglobulin heavy chain constant region of CH2 and CH3 comprising amino acids 253-468 of SEQ ID NO:802 or 803, (iii) the CH2CH3 constant region polypeptide is fused to a second linker, and (iv) the second linker is fused to a TNF-α antagonist of (a) or an IL17 antagonist of (b). In certain embodiments, the first linker is Linker 47 (SEQ ID NO:543), and the second linker is Linker 175 (SEQ ID NO:791). In one embodiment, the multi-specific fusion protein has an amino acid sequence as set forth in SEQ ID NO:802 or 803 (corresponding nucleic acid sequence provided in SEQ ID NO:809 and 810, respectively).

[0162] In other embodiments, a multi-specific xceptor fusion protein has (a) a TNF-α antagonist comprising an amino acid sequence at least 80% to 100% identical to a sequence as set forth in SEQ ID NO:671 or 672 or a contiguous fragment of about 140 to about 215 amino acids as set forth in SEQ ID NO:671 or 672, and (b) an IGF antagonist binding domain comprising an amino acid sequence at least 80% to 100% identical to SEQ ID NO:747 or 818, at least 80% to 100% identical to amino acids 490-723 of SEQ ID NO:804, at least 80% to 100% identical to amino acids 21-922 of SEQ ID NO:812, or at least 80% to 100% identical to amino acids 21-726 of SEQ ID NO:813 wherein, from amino-terminus to carboxy-terminus or from carboxy-terminus to amino-terminus, (i) a TNF-α antagonist of (a) or an IGF antagonist of (b) is fused to a first linker, (ii) the first linker is fused to an immunoglobulin heavy chain constant region of CH2 and CH3 comprising amino acids 253-468 of SEQ ID NO:804, (iii) the CH2CH3 constant region polypeptide is fused to a second linker, and (iv) the second linker is fused to a TNF-α antagonist of (a) or an IGF antagonist of (b). In certain embodiments, the first linker is Linker 47 (SEQ ID NO:543), and the second linker is Linker 175 (SEQ ID NO:791). In one embodiment, the multi-specific fusion protein has an amino acid sequence as set forth in SEQ ID NO:804 (corresponding nucleic acid sequence provided in SEQ ID NO:811).

### Making Multi-Specific Fusion Proteins

[0163] To efficiently produce any of the binding domain polypeptides or fusion proteins described herein, a leader peptide is used to facilitate secretion of expressed polypeptides and fusion proteins. Using any of the conventional leader peptides (signal sequences) is expected to direct nascently expressed polypeptides or fusion proteins into a secretory pathway and to result in cleavage of the leader peptide from the mature polypeptide or fusion protein at or near the junction between the leader peptide and the polypeptide or fusion protein. A particular leader peptide will be chosen based on considerations known in the art, such as using sequences encoded by polynucleotides that allow the easy inclusion of restriction endonuclease cleavage sites at the beginning or end of the coding sequence for the leader peptide to facilitate molecular engineering, provided that such introduced sequences specify amino acids that either do not interfere unacceptably with any desired processing of the leader peptide from the nascently expressed protein or do not interfere unacceptably with any desired function of a polypeptide or fusion protein molecule if the leader peptide is not cleaved during maturation of the polypeptides or fusion proteins. Exemplary leader peptides of this disclosure include natural leader sequences (i.e., those expressed with the native protein) or use of heterologous leader sequences, such as H₃N-MDFQVQIFSFLLISASVIMSRG(X)ₙ-CO₂H, wherein X is any amino acid and n is zero to three (SEQ ID NO:744) or H₃N-MEAPAQLLFLLLLWLPDTTG-CO₂H (SEQ ID NO:745).

[0164] As noted herein, variants and derivatives of binding domains, such as ectodomains, light and heavy variable regions and CDRs described herein, are contemplated. In one example, insertion variants are provided wherein one or more amino acid residues supplement a specific binding agent amino acid sequence. Insertions may be located at either or both termini of the protein, or may be positioned within internal regions of the specific binding agent amino acid sequence. Variant products of this disclosure also include mature specific binding agent products, i.e., specific binding agent products wherein a leader or signal sequence is removed, and the resulting protein having additional amino terminal residues. The additional amino terminal residues may be derived from another protein, or may include one or more residues that are not identifiable as being derived from a specific protein. Polypeptides with an additional methionine residue at position −1 are contemplated, as are polypeptides of this disclosure with additional methionine and lysine residues at positions −2 and −1. Variants having additional Met, Met-Lys or Lys residues (or one or more basic residues in general) are particularly useful for enhanced recombinant protein production in bacterial host cells.

[0165] As used herein, “amino acids” refer to a natural (those occurring in nature) amino acid, a substituted natural amino acid, a non-natural amino acid, a substituted non-natural amino acid, or any combination thereof. The designations for natural amino acids are herein set forth as either the standard one- or three-letter code. Natural polar amino acids include asparagine (Asp or N) and glutamine (Gln or Q); as well as basic amino acids such as arginine (Arg or R), lysine (Lys or K), histidine (His or H), and derivatives thereof; and acidic amino acids such as aspartic acid (Asp or D) and glutamic acid (Glu or E), and derivatives thereof. Natural hydrophobic amino acids include tryptophan (Trp or W), phenylalanine (Phe or F), isoleucine (Ile or I), leucine (Leu or L), methionine (Met or M), valine (Val or V), and derivatives thereof; as well as other non-polar amino acids such as glycine (GIy or G), alanine (Ala or A), proline (Pro or P), and derivatives thereof. Natural amino acids of intermediate polarity include serine (Ser or S), threonine (Thr or T), tyrosine (Tyr or Y), cysteine (Cys or C), and derivatives thereof. Unless specified otherwise, any amino acid described herein may be in either the D- or L-configuration.

[0166] Substitution variants include those fusion proteins wherein one or more amino acid residues in an amino acid sequence are removed and replaced with alternative residues. In some embodiments, the substitutions are conservative in nature; however, this disclosure embraces substitutions that are also non-conservative. Amino acids can be classified according to physical properties and contribution to secondary and tertiary protein structure. A conservative substitution is recognized in the art as a substitution of one amino acid for another amino acid that has similar properties. Exemplary conservative substitutions are set out in Table 1 (see WO 97/09433, page 10, published Mar. 13, 1997), immediately below.

TABLE 1
Conservative Substitutions I

| Side Chain | Characteristic | Amino Acid |
|---|---|---|
| Aliphatic | Non-polar | G, A, P, I, L, V |
| | Polar - uncharged | S, T, M, N, Q |
| | Polar - charged | D, E, K, R |
| Aromatic | | H, F, W, Y |
| Other | | N, Q, D, E |

[0167] Alternatively, conservative amino acids can be grouped as described in Lehninger (Biochemistry, Second Edition; Worth Publishers, Inc. NY:NY (1975), pp. 71-77) as set out in Table 2, immediately below.

TABLE 2
Conservative Substitutions II

| Side Chain | Characteristic | Amino Acid |
|---|---|---|
| Non-polar (hydrophobic) | Aliphatic: | A, L, I, V, P |
| | Aromatic | F, W |
| | Sulfur-containing | M |
| | Borderline | G |
| Uncharged-polar | Hydroxyl | S, T, Y |
| | Amides | N, Q |
| | Sulfhydryl | C |
| | Borderline | G |
| Positively Charged (Basic) | | K, R, H |
| Negatively Charged | | D, E |
| (Acidic) | | |

[0168] Variants or derivatives can also have additional amino acid residues which arise from use of specific expression systems. For example, use of commercially available vectors that express a desired polypeptide as part of a glutathione-S-transferase (GST) fusion product provides the desired polypeptide having an additional glycine residue at position −1 after cleavage of the GST component from the desired polypeptide. Variants which result from expression in other vector systems are also contemplated, including those wherein histidine tags are incorporated into the amino acid sequence, generally at the carboxy and/or amino terminus of the sequence.

[0169] Deletion variants are also contemplated wherein one or more amino acid residues in a binding domain of this disclosure are removed. Deletions can be effected at one or both termini of the fusion protein, or from removal of one or more residues within the amino acid sequence.

[0170] In certain illustrative embodiments, fusion proteins of this disclosure are glycosylated, the pattern of glycosylation being dependent upon a variety of factors including the host cell in which the protein is expressed (if prepared in recombinant host cells) and the culture conditions.

[0171] This disclosure also provides derivatives of fusion proteins. Derivatives include specific binding domain polypeptides bearing modifications other than insertion, deletion, or substitution of amino acid residues. In certain embodiments, the modifications are covalent in nature, and include for example, chemical bonding with polymers, lipids and other organic or inorganic moieties. Derivatives of this disclosure may be prepared to increase circulating half-life of a specific binding domain polypeptide, or may be designed to improve targeting capacity for the polypeptide to desired cells, tissues or organs.

[0172] This disclosure further embraces fusion proteins that are covalently modified or derivatized to include one or more water-soluble polymer attachments such as polyethylene glycol, polyoxyethylene glycol or polypropylene glycol, as described in U.S. Pat. Nos. 4,640,835; 4,496,689; 4,301,144; 4,670,417; 4,791,192 and 4,179,337. Still other useful polymers known in the art include monomethoxy-polyethylene glycol, dextran, cellulose and other carbohydrate-based polymers, poly-(N-vinyl pyrrolidone)-polyethylene glycol, propylene glycol homopolymers, a polypropylene oxide/ethylene oxide co-polymer, polyoxyethylated polyols (e.g., glycerol) and polyvinyl alcohol, as well as mixtures of these polymers. Particularly preferred are polyethylene glycol (PEG)-derivatized proteins. Water-soluble polymers may be bonded at specific positions, for example at the amino terminus of the proteins and polypeptides according to this disclosure, or randomly attached to one or more side chains of the polypeptide. The use of PEG for improving therapeutic capacities is described in U.S. Pat. No. 6,133,426.

[0173] A particular embodiment of this disclosure is an immunoglobulin or an Fc fusion protein. Such a fusion protein can have a long half-life, e.g., several hours, a day or more, or even a week or more, especially if the Fc domain is capable of interacting with FcRn, the neonatal Fc receptor. The binding site for FcRn in an Fc domain is also the site at which the bacterial proteins A and G bind. The tight binding between these proteins can be used as a means to purify antibodies or fusion proteins of this disclosure by, for example, employing protein A or protein G affinity chromatography during protein purification.

[0174] Protein purification techniques are well known to those of skill in the art. These techniques involve, at one level, the crude fractionation of the polypeptide and non-polypeptide fractions. Further purification using chromatographic and electrophoretic techniques to achieve partial or complete purification (or purification to homogeneity) is frequently desired. Analytical methods particularly suited to the preparation of a pure fusion protein are ion-exchange chromatography, exclusion chromatography, polyacrylamide gel electrophoresis and isoelectric focusing. Particularly efficient methods of purifying peptides are fast protein liquid chromatography and HPLC.

[0175] Certain aspects of the present disclosure concern the purification, and in particular embodiments, the substantial purification, of a fusion protein. The term “purified fusion protein” as used herein, is intended to refer to a composition, isolatable from other components, wherein the fusion protein is purified to any degree relative to its naturally obtainable state. A purified fusion protein therefore also refers to a fusion protein, free from the environment in which it may naturally occur.

[0176] Generally, “purified” will refer to a fusion protein composition that has been subjected to fractionation to remove various other components, and which composition substantially retains its expressed biological activity. Where the term “substantially purified” is used, this designation refers to a fusion binding protein composition in which the fusion protein forms the major component of the composition, such as constituting about 50%, about 60%, about 70%, about 80%, about 90%, about 95%, about 99% or more of the protein, by weight, in the composition.

[0177] Various methods for quantifying the degree of purification are known to those of skill in the art in light of the present disclosure. These include, for example, determining the specific binding activity of an active fraction, or assessing the amount of fusion protein in a fraction by SDS/PAGE analysis. A preferred method for assessing the purity of a protein fraction is to calculate the binding activity of the fraction, to compare it to the binding activity of the initial extract, and to thus calculate the degree of purification, herein assessed by a “-fold purification number.” The actual units used to represent the amount of binding activity will, of course, be dependent upon the particular assay technique chosen to follow the purification and whether or not the expressed fusion protein exhibits a detectable binding activity.

[0178] Various techniques suitable for use in protein purification are well known to those of skill in the art. These include, for example, precipitation with ammonium sulfate, PEG, antibodies and the like, or by heat denaturation, followed by centrifugation; chromatography steps such as ion exchange, gel filtration, reverse phase, hydroxylapatite, and affinity chromatography; isoelectric focusing; gel electrophoresis; and combinations of these and other techniques. As is generally known in the art, it is believed that the order of conducting the various purification steps may be changed, or that certain steps may be omitted, and still result in a suitable method for the preparation of a substantially purified protein.

[0179] There is no general requirement that the fusion protein always be provided in its most purified state. Indeed, it is contemplated that less substantially purified proteins will have utility in certain embodiments. Partial purification may be accomplished by using fewer purification steps in combination, or by utilizing different forms of the same general purification scheme. For example, it is appreciated that a cation-exchange column chromatography performed utilizing an HPLC apparatus will generally result in greater purification than the same technique utilizing a low pressure chromatography system. Methods exhibiting a lower degree of relative purification may have advantages in total recovery of protein product, or in maintaining binding activity of an expressed protein.

[0180] It is known that the migration of a polypeptide can vary, sometimes significantly, with different conditions of SDS/PAGE (Capaldi et al. (1977) Biochem. Biophys. Res. Comm. 76:425). It will therefore be appreciated that under differing electrophoresis conditions, the apparent molecular weights of purified or partially purified fusion protein expression products may vary.

### Polynucleotides, Expression Vectors, and Host Cells

[0181] This disclosure provides polynucleotides (isolated or purified or pure polynucleotides) encoding the multi-specific fusion protein of this disclosure, vectors (including cloning vectors and expression vectors) comprising such polynucleotides, and cells (e.g., host cells) transformed or transfected with a polynucleotide or vector according to this disclosure.

[0182] In certain embodiments, a polynucleotide (DNA or RNA) encoding a binding domain of this disclosure, or a multi-specific fusion protein containing one or more such binding domains is contemplated. Expression cassettes encoding multi-specific fusion protein constructs are provided in the examples appended hereto.

[0183] The present disclosure also relates to vectors that include a polynucleotide of this disclosure and, in particular, to recombinant expression constructs. In one embodiment, this disclosure contemplates a vector comprising a polynucleotide encoding a multi-specific fusion protein containing a TNF-α antagonist domain and an IL6, RANKL, IL7, IL17A/F, TWEAK, CSF2, IGF1, IGF2 or BLys/APRIL antagonist binding domain or an IL10 agonist binding domain of this disclosure, along with other polynucleotide sequences that cause or facilitate transcription, translation and processing of such multi-specific fusion protein-encoding sequences.

[0184] Appropriate cloning and expression vectors for use with prokaryotic and eukaryotic hosts are described, for example, in Sambrook et al., Molecular Cloning: A Laboratory Manual, Second Edition, Cold Spring Harbor, N.Y., (1989). Exemplary cloning/expression vectors include cloning vectors, shuttle vectors and expression constructs that may be based on plasmids, phagemids, phasmids, cosmids, viruses, artificial chromosomes, or any nucleic acid vehicle known in the art suitable for amplification, transfer and/or expression of a polynucleotide contained therein

[0185] As used herein, “vector” means a nucleic acid molecule capable of transporting another nucleic acid to which it has been linked. Exemplary vectors include plasmids, yeast artificial chromosomes and viral genomes. Certain vectors can autonomously replicate in a host cell, while other vectors can be integrated into the genome of a host cell and thereby are replicated with the host genome. In addition, certain vectors are referred to herein as “recombinant expression vectors” (or simply, “expression vectors”), which contain nucleic acid sequences that are operatively linked to an expression control sequence and, therefore, are capable of directing the expression of those sequences.

[0186] In certain embodiments, expression constructs are derived from plasmid vectors. Illustrative constructs include modified pNASS vector (Clontech, Palo Alto, Calif.), which has nucleic acid sequences encoding an ampicillin resistance gene, a polyadenylation signal and a T7 promoter site; pDEF38 and pNEF38 (CMC ICOS Biologics, Inc.), which have a CHEF1 promoter; and pD18 (Lonza), which has a CMV promoter. Other suitable mammalian expression vectors are well known (see, e.g., Ausubel et al., 1995; Sambrook et al., supra; see also, e.g., catalogs from Invitrogen, San Diego, Calif.; Novagen, Madison, Wis.; Pharmacia, Piscataway, N.J.). Useful constructs may be prepared that include a dihydrofolate reductase (DHFR)-encoding sequence under suitable regulatory control, for promoting enhanced production levels of the fusion proteins, which levels result from gene amplification following application of an appropriate selection agent (e.g., methotrexate).

[0187] Generally, recombinant expression vectors will include origins of replication and selectable markers permitting transformation of the host cell, and a promoter derived from a highly-expressed gene to direct transcription of a downstream structural sequence, as described above. A vector in operable linkage with a polynucleotide according to this disclosure yields a cloning or expression construct. Exemplary cloning/expression constructs contain at least one expression control element, e.g., a promoter, operably linked to a polynucleotide of this disclosure. Additional expression control elements, such as enhancers, factor-specific binding sites, terminators and ribosome binding sites, are also contemplated in the vectors and cloning/expression constructs according to this disclosure. The heterologous structural sequence of the polynucleotide according to this disclosure is assembled in appropriate phase with translation initiation and termination sequences. Thus, for example, the fusion protein-encoding nucleic acids as provided herein may be included in any one of a variety of expression vector constructs as a recombinant expression construct for expressing such a protein in a host cell.

[0188] The appropriate DNA sequence(s) may be inserted into a vector, for example, by a variety of procedures. In general, a DNA sequence is inserted into an appropriate restriction endonuclease cleavage site(s) by procedures known in the art. Standard techniques for cloning, DNA isolation, amplification and purification, for enzymatic reactions involving DNA ligase, DNA polymerase, restriction endonucleases and the like, and various separation techniques are contemplated. A number of standard techniques are described, for example, in Ausubel et al. (Current Protocols in Molecular Biology, Greene Publ. Assoc. Inc. & John Wiley & Sons, Inc., Boston, Mass., 1993); Sambrook et al. (Molecular Cloning, Second Ed., Cold Spring Harbor Laboratory, Plainview, N.Y., 1989); Maniatis et al. (Molecular Cloning, Cold Spring Harbor Laboratory, Plainview, N.Y., 1982); Glover (Ed.) (DNA Cloning Vol. I and II, IRL Press, Oxford, UK, 1985); Hames and Higgins (Eds.) (Nucleic Acid Hybridization, IRL Press, Oxford, UK, 1985); and elsewhere.

[0189] The DNA sequence in the expression vector is operatively linked to at least one appropriate expression control sequence (e.g., a constitutive promoter or a regulated promoter) to direct mRNA synthesis. Representative examples of such expression control sequences include promoters of eukaryotic cells or their viruses, as described above. Promoter regions can be selected from any desired gene using CAT (chloramphenicol transferase) vectors or other vectors with selectable markers. Eukaryotic promoters include CMV immediate early, HSV thymidine kinase, early and late SV40, LTRs from retrovirus, and mouse metallothionein-I. Selection of the appropriate vector and promoter is well within the level of ordinary skill in the art, and preparation of certain particularly preferred recombinant expression constructs comprising at least one promoter or regulated promoter operably linked to a nucleic acid encoding a protein or polypeptide according to this disclosure is described herein.

[0190] Variants of the polynucleotides of this disclosure are also contemplated. Variant polynucleotides are at least 90%, and preferably 95%, 99%, or 99.9% identical to one of the polynucleotides of defined sequence as described herein, or hybridize to one of those polynucleotides of defined sequence under stringent hybridization conditions of 0.015M sodium chloride, 0.0015M sodium citrate at about 65-68° C. or 0.015M sodium chloride, 0.0015M sodium citrate and 50% formamide at about 42° C. The polynucleotide variants retain the capacity to encode a binding domain, or fusion protein thereof, having the functionality described herein.

[0191] The term “stringent” is used to refer to conditions that are commonly understood in the art as stringent. Hybridization stringency is principally determined by temperature, ionic strength and the concentration of denaturing agents, such as formamide. Examples of stringent conditions for hybridization and washing are 0.015M sodium chloride, 0.0015M sodium citrate at about 65-68° C. or 0.015M sodium chloride, 0.0015M sodium citrate, and 50% formamide at about 42° C. (see Sambrook et al., Molecular Cloning: A Laboratory Manual, 2nd Ed., Cold Spring Harbor Laboratory, Cold Spring Harbor, N.Y., 1989).

[0192] More stringent conditions (such as higher temperature, lower ionic strength, higher formamide or other denaturing agent) may also be used; however, the rate of hybridization will be affected. In instances wherein hybridization of deoxyoligonucleotides is concerned, additional exemplary stringent hybridization conditions include washing in 6×SSC, 0.05% sodium pyrophosphate at 37° C. (for 14-base oligonucleotides), 48° C. (for 17-base oligonucleotides), 55° C. (for 20-base oligonucleotides), and 60° C. (for 23-base oligonucleotides).

[0193] A further aspect of this disclosure provides a host cell transformed or transfected with, or otherwise containing, any of the polynucleotides or vector/expression constructs of this disclosure. The polynucleotides or cloning/expression constructs of this disclosure are introduced into suitable cells using any method known in the art, including transformation, transfection and transduction. Host cells include the cells of a subject undergoing ex vivo cell therapy including, for example, ex vivo gene therapy. Eukaryotic host cells contemplated as an aspect of this disclosure when harboring a polynucleotide, vector, or protein according to this disclosure include, in addition to a subject's own cells (e.g., a human patient's own cells), VERO cells, HeLa cells, Chinese hamster ovary (CHO) cell lines (including modified CHO cells capable of modifying the glycosylation pattern of expressed multivalent binding molecules, see US Patent Application Publication No. 2003/0115614), COS cells (such as COS-7), W138, BHK, HepG2, 3T3, RIN, MDCK, A549, PC12, K562, HEK293 cells, HepG2 cells, N cells, 3T3 cells, Spodoptera frugiperda cells (e.g., Sf9 cells), Saccharomyces cerevisiae cells, and any other eukaryotic cell known in the art to be useful in expressing, and optionally isolating, a protein or peptide according to this disclosure. Also contemplated are prokaryotic cells, including Escherichia coli, Bacillus subtilis, Salmonella typhimurium, a Streptomycete, or any prokaryotic cell known in the art to be suitable for expressing, and optionally isolating, a protein or peptide according to this disclosure. In isolating protein or peptide from prokaryotic cells, in particular, it is contemplated that techniques known in the art for extracting protein from inclusion bodies may be used. The selection of an appropriate host is within the scope of those skilled in the art from the teachings herein. Host cells that glycosylate the fusion proteins of this disclosure are contemplated.

[0194] The term “recombinant host cell” (or simply “host cell”) refers to a cell containing a recombinant expression vector. It should be understood that such terms are intended to refer not only to the particular subject cell but to the progeny of such a cell. Because certain modifications may occur in succeeding generations due to either mutation or environmental influences, such progeny may not, in fact, be identical to the parent cell, but are still included within the scope of the term “host cell” as used herein.

[0195] Recombinant host cells can be cultured in a conventional nutrient medium modified as appropriate for activating promoters, selecting transformants, or amplifying particular genes. The culture conditions for particular host cells selected for expression, such as temperature, pH and the like, will be readily apparent to the ordinarily skilled artisan. Various mammalian cell culture systems can also be employed to express recombinant protein. Examples of mammalian expression systems include the COS-7 lines of monkey kidney fibroblasts, described by Gluzman (1981) Cell 23:175, and other cell lines capable of expressing a compatible vector, for example, the C127, 3T3, CHO, HeLa and BHK cell lines. Mammalian expression vectors will comprise an origin of replication, a suitable promoter and, optionally, enhancer, and also any necessary ribosome binding sites, polyadenylation site, splice donor and acceptor sites, transcriptional termination sequences, and 5′-flanking nontranscribed sequences, for example, as described herein regarding the preparation of multivalent binding protein expression constructs. DNA sequences derived from the SV40 splice, and polyadenylation sites may be used to provide the required nontranscribed genetic elements. Introduction of the construct into the host cell can be effected by a variety of methods with which those skilled in the art will be familiar, including calcium phosphate transfection, DEAE-Dextran-mediated transfection, or electroporation (Davis et al. (1986) Basic Methods in Molecular Biology).

[0196] In one embodiment, a host cell is transduced by a recombinant viral construct directing the expression of a protein or polypeptide according to this disclosure. The transduced host cell produces viral particles containing expressed protein or polypeptide derived from portions of a host cell membrane incorporated by the viral particles during viral budding.

### Compositions and Methods of Use

[0197] To treat human or non-human mammals suffering a disease state associated with TNF-α, IL6, RANKL, IL7, IL17A/F, TWEAK, CSF2, IGF1, IGF2, BLys/APRIL or IL10 dysregulation, a multi-specific fusion protein of this disclosure is administered to the subject in an amount that is effective to ameliorate symptoms of the disease state following a course of one or more administrations. Being polypeptides, the multi-specific fusion proteins of this disclosure can be suspended or dissolved in a pharmaceutically acceptable diluent, optionally including a stabilizer of other pharmaceutically acceptable excipients, which can be used for intravenous administration by injection or infusion, as more fully discussed below.

[0198] A pharmaceutically effective dose is that dose required to prevent, inhibit the occurrence of, or treat (alleviate a symptom to some extent, preferably all symptoms of) a disease state. The pharmaceutically effective dose depends on the type of disease, the composition used, the route of administration, the type of subject being treated, the physical characteristics of the specific subject under consideration for treatment, concurrent medication, and other factors that those skilled in the medical arts will recognize. For example, an amount between 0.1 mg/kg and 100 mg/kg body weight (which can be administered as a single dose, or in multiple doses given hourly, daily, weekly, monthly, or any combination thereof that is an appropriate interval) of active ingredient may be administered depending on the potency of a binding domain polypeptide or multi-specific protein fusion of this disclosure.

[0199] In certain aspects, compositions of fusion proteins are provided by this disclosure. Pharmaceutical compositions of this disclosure generally comprise one or more type of binding domain or fusion protein in combination with a pharmaceutically acceptable carrier, excipient, or diluent. Such carriers will be nontoxic to recipients at the dosages and concentrations employed. Pharmaceutically acceptable carriers for therapeutic use are well known in the pharmaceutical art, and are described, for example, in Remington's Pharmaceutical Sciences, Mack Publishing Co. (A.R. Gennaro (Ed.) 1985). For example, sterile saline and phosphate buffered saline at physiological pH may be used. Preservatives, stabilizers, dyes and the like may be provided in the pharmaceutical composition. For example, sodium benzoate, sorbic acid, or esters of p-hydroxybenzoic acid may be added as preservatives. Id. at 1449. In addition, antioxidants and suspending agents may be used. Id. The compounds of the present invention may be used in either the free base or salt forms, with both forms being considered as being within the scope of the present invention.

[0200] Pharmaceutical compositions may also contain diluents such as buffers, antioxidants such as ascorbic acid, low molecular weight (less than about 10 residues) polypeptides, proteins, amino acids, carbohydrates (e.g., glucose, sucrose, or dextrins), chelating agents (e.g., EDTA), glutathione or other stabilizers or excipients. Neutral buffered saline or saline mixed with nonspecific serum albumin are exemplary appropriate diluents. Preferably, product is formulated as a lyophilizate using appropriate excipient solutions as diluents.

[0201] In certain embodiments, cis-signaling of IL6 is minimally or not inhibited, i.e., any inhibition of cis-signaling is not substantial, meaning that inhibition is non-existent, asymptomatic, or not detectable. The extent of inhibition of IL6 trans-signaling can vary, but in general trans-signaling is altered to an extent that has a positive effect on symptoms of a disease state mediated by or associated with such signaling. In certain embodiments, inhibition of trans-signaling of IL6 by binding domain polypeptides or fusion proteins thereof of this disclosure can retard, stop, or reverse disease progression.

[0202] Compositions of this disclosure can be used to treat disease states in human and non-human mammals that are mediated by TNF-α, IL6, RANKL, IL7, IL17A/F, TWEAK, CSF2, IGF1, IGF2, BLyS/APRIL or IL10 signaling.

[0203] Increased production of IL-6, and thus IL-6 signaling, has been implicated in various disease processes, including Alzheimer's disease, autoimmunity (e.g., rheumatoid arthritis, SLE), inflammation, myocardial infarction, Paget's disease, osteoporosis, solid tumors (e.g., colon cancer, RCC prostatic and bladder cancers), certain neurological cancers, B-cell malignancies (e.g., Castleman's disease, some lymphoma subtypes, chronic lymphocytic leukemia, and, in particular, malignant melanoma). In some instances, IL-6 is implicated in proliferation pathways because it acts with other factors, such as heparin-binding epithelial growth factor and hepatocyte growth factor (see, e.g., Grant et al. (2002) Oncogene 21:460; Badache and Hynes (2001) Cancer Res. 61:383; Wang et al. (2002) Oncogene 21:2584). Similarly, the TNF superfamily is known to be involved in a variety of disorders, such as cancer (tumorigenesis, including proliferation, migration, metastasis), autoimmunity (SLE, diabetes), chronic heart failure, bone resorption, and atherosclerosis, to name a few (see, e.g., Aggarwal (2003) Nature Rev. 3:745; Lin et al. (2008) Clin. Immunol. 126:13).

[0204] Mutations in the RANK gene causing an increase in RANK-mediated signaling have been shown to result in an increase in osteoclast formation and account for the increased osteolysis seen in some patients with familial Paget's disease (see, e.g., Boyce and Xing, Arthritis Research and Therapy 2007; 9 Suppl 1:S1). RANKL is thought to play a role in inducing tumor cell proliferation, as it is expressed by some malignant tumor cells, as well as in psoriatic arthritis (see, e.g., Ritchlin et al. (2003) J. Clin. Invest. 111:821; Mease (2006) Psoriasis Forum 12:4). Treatment of postmenopausal women with low bone density with denosumab, a monoclonal antibody that inhibits RANKL, has been shown to increase bone mineral density and suppress bone turnover markers. Similarly, denosumab has been used clinincally to treat individuals with rheumatoid arthritis (see, e.g., Cohen et al. (2008) Arthritis Rheum. 58:1299) and osteolytic cancer (see, e.g., Lipton et al. (2007) J. Clin. Oncol. 25:4431). Direct injection of OPG has been shown to decrease bone resorption (see, e.g., Morony et al. (1993) J. Bone Min. Res. 14:1478).

[0205] The IL7 pathway has been linked to bone disease, such as rheumatoid arthritis, multiple myeloma, and periodontitis (Colucci et al. (2007) J. Pathol. 212:47). The IL7 pathway is also implicated in rheumatoid arthritis in that it is produced by inflamed synoviocytes and induces cell-contact dependent Th1 cytokine production in co-cultures of synovial T cells and monocytes (van Roon et al., (2008) Ann. Rheum. Dis. 67:1054). IL7 promotes numerous pro-inflammatory responses that include T cell activation, which can overrule regulatory T cell function in rheumatoid arthritis. IL7 also induces bone loss in vivo by eliciting T cell production and key osteoclastogenic cytokines RANKL and TNFα. In addition, IL7 leads to the expansion of the OC precursor pool by inducing the proliferation of bone marrow B220⁺ cells (Toraldo et al. (2003) Proc. Nat'l Acad. Sci. (USA) 100:125). IL7 levels and activity in patients with rheumatoid arthritis do not respond to anti-TNFα treatment, indicating that IL7 may be a good target for treatment in these patients (van Roon et al., 2008).

[0206] High levels of IL17A have been associated with several chronic inflammatory diseases, including rheumatoid arthritis, psoriasis and multiple sclerosis. For example, elevated levels of IL17 have been reported to occur in the synovial fluid of rheumatoid arthritis (RA) patients and are believed to play a role in the bone destruction characteristic of RA. IL17 has also been shown to induce NO production in chondrocytes and in human osteoarthritic cartilage explants (Attur et al. (1997) Arthritis Rheum. 40:1050). Furthermore, it has been shown that reagents that neutralize IL17A significantly ameliorate disease severity in several mouse models of human disease.

[0207] IL17F has been associated with the development of several autoimmune diseases, including arthritis (including rheumatoid arthritis and Lyme arthritis), systemic lupus erythematosus (SLE), multiple sclerosis and asthma (Betteli and Kuchroo (2005) J. Exp. Med. 201:169-71; Oda et al. (2006) Am. J. Resp. Crit. Care Med. Jan. 15, 2006; Numasake et al. (2004) Immunol. Lett. 95:97-104). Studies by Hymowitz et al. have indicated that IL17F is unique among known inflammatory cytokines in that it increases proteoglycan breakdown and decreases proteoglycan synthesis by articular cartilage (Hymowitz et al. (2001) EMBO J. 20:5332-41).

[0208] IL17RA has been shown to play a role in a number of inflammatory conditions including arthritis, rheumatoid arthritis, psoriasis, inflammatory bowel disease, multiple sclerosis and asthma (Li et al. (2004) Huazhong Univ. Sci. Technolog. Med. Sci. 24:294; Fujino et al. (2003) Gut 52:65; Kauffman et al. (2004) J. Invest. Dermatol. 123:1037-1044; Mannon et al. (2004) N. Engl. J. Med. 351:2069; Matusevicius et al. (1999) Mult. Scler. 5:101; Linden et al. (2000) Eur. Respir. J. 15:973; and Molet et al. (2001) J. Allergy Clin. Immunol. 108:430).

[0209] The cognate TWEAK receptor, TWEAKR or fibroblast growth factor-inducible 14 (Fn14), is a TNF receptor superfamily member expressed by non-lymphoid cell types (Wiley et al. (2001) Immunity 15:837). Expression of TWEAK and TWEAKR is relatively low in normal tissues but is significantly upregulated in tissue injury and diseases. The TWEAK/R pathway facilitates acute tissue repair functions and thus functions physiologically after acute injury but functions pathologically in chronic inflammatory disease settings. In contrast to TNF, TWEAK plays no apparent role in development or homeostasis. A review of the TWEAK/R pathway is provided in Burkly et al. (2007) Cytokine 40:1. Persistently activated TWEAK promotes chronic inflammation, pathological hyperplasia and angiogenesis, and potentially impedes tissue repair by inhibiting differentiation of progenitor cells. TWEAK protein has been identified on the surface of activated monocytes and T cells and on tumor cell lines, and intracellularly in resting and activated monocytes, dendritic cells and NK cells. TWEAK expression is significantly increased locally in acute injury, inflammatory disease and cancer, all of which are associated with infiltration of inflammatory cells and/or activation of resident innate immune cell types. Circulating TWEAK levels have been shown to be significantly increased in patients with chronic inflammatory diseases such as multiple sclerosis and systemic lupus erythematosus.

[0210] TWEAK blocking monoclonal antibodies have been shown to be effective in a mouse collagen-induced arthritis (CIA) model (Kamata et al. (2006) J. Immunol. 177:6433; Perper et al. (2006) J. Immunol. 177:2610). The arthritogenic activities of TWEAK and TNF on human synoviocytes are often additive or synergistic and appear independent of one another, indicating that TWEAK and TNF may act in parallel in pathology of rheumatoid arthritis. It has been speculated that the heterogeneity of RA patients with respect to their clinical response to TNF inhibitors may reflect a pathological contribution by TWEAK.

[0211] U.S. Pat. No. 7,169,387 describes the preparation of a monoclonal antibody specific for TWEAK and its use to block aspects of the development of graft-versus-host disease (GVHD) using a mouse model of chronic GVHD. US Patent Application Publication No. 2007/0280940 describes TWEAKR decoy receptors and antibodies against TWEAKR and TWEAK, together with their use in the treatment of central nervous system diseases associated with cerebral edema and cell death.

[0212] Several groups have shown that CSF2, as well as its receptor, are present in the synovial joint of arthritis patients (see, e.g., Alvaro-Gracia et al. (1991) J. Immunol. 146:3365). Furthermore, CSF2 has been shown to cause flares of rheumatoid arthritis in patients treated with CSF2 for neutropenia in Felty's syndrome (Hazenberg et al. (1989) Blood 74:2769) or after chemotherapy (de Vries et al. (1991) Lancet 338:517). In multiple sclerosis, elevated levels of CSF2 correlate with the active phase of disease (Carrieri et al. (1998) Immunopharmacol. Immunotoxicol. 20:373; McQualter et al. (2001) J. Exp. Med. 194:873). Elevated levels of CSF2 in the lung together with eosinophils have been found in asthma (Broide and Firestein (1991) J. Clin. Invest. 88:1048).

[0213] IGF1R has been identified in the treatment of cancers, including sarcomas (Scotlandi & Picci (2008) Curr. Opin. Oncol. 20:419-27; Yuen & Macaulay (2008) Expert Opin. Ther. Targets 12:589-603).

[0214] Elevated levels of BLyS/APRIL have been found in patients with autoimmune disorders such as systemic lupus erythematosus (SLE), rheumatoid arthritis and Sjogren's syndrome, with a higher BLyS levels being associated with increased severity of disease (Cheema et al. (2001) Arthritis Rheum. 44:1313; Groom et al. (2002) J. Clin. Invest. 109:59; Zhang et al. (2001) J. Immunol. 166:6). In addition, APRIL, BLyS, and TACI, together with BCMA, have been shown to convey powerful survival and growth-inducing signals in vitro to malignant cells taken from Hodgkin lymphoma (HL) tumor tissue, indicating a possible role for these proteins in the treatment of HL and other forms of cancer (Chiu et al. (2007) Blood 109:729).

[0215] IL10 is known to have immunosuppressive properties (Commins et al. (2008) J. Allergy Clin. Immunol. 121:1108-11; Ming et al. (2008) Immunity 28:468-476), and beneficial responses have been seen following administration of IL10 to patients with psoriasis (Asadullah et al. (1999) Arch. Dermatol. 135:187-92) and inflammatory bowel disease (Schreiber et al. (2000) Gastroenterology 119:1461-72).

[0216] Agents comprising the binding domain of this disclosure are useful in treating autoimmune and other disorders including Alzheimer's disease, rheumatoid arthritis, ankylosing spondylitis, juvenile rheumatoid arthritis, juvenile idiopathic arthritis, psoriatic arthritis, psoriasis, chronic obstructive pulmonary disease (COPD), Chron's disease, ulcerative colitis, severe refractory asthma, TNFRSF1A-associated periodic syndrome (TRAPS), endometriosis, systemic lupus erythematosus (SLE), inflammatory bowel disease (IBD), Sjogren's syndrome, multiple sclerosis, Graves' disease, severe refractory asthma, Hashimoto's disease, Castleman's disease, central nervous system inflammation, stroke, cerebral edema, transplant rejection, graft-versus-host disease (GVHD), acute and chronic inflammation, atopic dermatitis, shock, enteropathic arthritis, reactive arthritis, Reter's syndrome, SEA Syndrome, (Seronegativity, Enthesopathy, Arthropathy Syndrome), dermatomyositis, scleroderma, vasculitis, myolitis, osteoarthritis, sarcoidosis, sclerosis, dermatitis, atopic dermatitis, lupus, Still's disease, myasthenia gravis, celiac disease, Guillain-Barre disease, Type I diabetes mellitus, Addison's disease, Paget's disease, degenerative joint disease, osteoporosis and other disorders involving loss of bone mass, and cancers, including hormone-independent prostate cancer, osteolytic cancer, multiple myeloma, B-cell proliferative disorders such as B cell non-Hodgkin's lymphoma, and advanced cancers of kidney, breast, colon, lung, brain, and other tissues.

[0217] Also contemplated is the administration of multi-specific fusion protein compositions of this disclosure in combination with a second agent. A second agent may be one accepted in the art as a standard treatment for a particular disease state, such as inflammation, autoimmunity, and cancer. Exemplary second agents contemplated include cytokines, growth factors, steroids, NSAIDs, DMARDs, chemotherapeutics, radiotherapeutics, or other active and ancillary agents, or any combination thereof.

[0218] “Pharmaceutically acceptable salt” refers to a salt of a binding domain polypeptide or fusion protein of this disclosure that is pharmaceutically acceptable and that possesses the desired pharmacological activity of the parent compound. Such salts include the following: (1) acid addition salts, formed with inorganic acids such as hydrochloric acid, hydrobromic acid, sulfuric acid, nitric acid, phosphoric acid, and the like; or formed with organic acids such as acetic acid, propionic acid, hexanoic acid, cyclopentanepropionic acid, glycolic acid, pyruvic acid, lactic acid, malonic acid, succinic acid, malic acid, maleic acid, fumaric acid, tartaric acid, citric acid, benzoic acid, 3-(4-hydroxybenzoyl)benzoic acid, cinnamic acid, mandelic acid, methanesulfonic acid, ethanesulfonic acid, 1,2-ethane-disulfonic acid, 2-hydroxyethanesulfonic acid, benzenesulfonic acid, 4-chlorobenzenesulfonic acid, 2-naphthalenesulfonic acid, 4-toluenesulfonic acid, camphorsulfonic acid, 4-methylbicyclo[2.2.2]-oct-2-ene-1-carboxylic acid, glucoheptonic acid, 3-phenylpropionic acid, trimethylacetic acid, tertiary butylacetic acid, lauryl sulfuric acid, gluconic acid, glutamic acid, hydroxynaphthoic acid, salicylic acid, stearic acid, muconic acid, and the like; or (2) salts formed when an acidic proton present in the parent compound either is replaced by a metal ion, e.g., an alkali metal ion, an alkaline earth ion, or an aluminum ion; or coordinates with an organic base such as ethanolamine, diethanolamine, triethanolamine, N-methylglucamine, or the like.

[0219] In particular illustrative embodiments, a polypeptide or fusion protein of this disclosure is administered intravenously by, for example, bolus injection or infusion. Routes of administration in addition to intravenous include oral, topical, parenteral (e.g., sublingually or buccally), sublingual, rectal, vaginal, intranasal, and perispinal. The term parenteral as used herein includes subcutaneous injections, intravenous, intramuscular, intrasternal, intracavernous, intrathecal, intrameatal, intraurethral injection or infusion techniques. The pharmaceutical composition is formulated so as to allow the active ingredients contained therein to be bioavailable upon administration of the composition to a patient. Compositions that will be administered to a patient take the form of one or more dosage units, where for example, a tablet may be a single dosage unit, and a container of one or more compounds of this disclosure in aerosol form may hold a plurality of dosage units.

[0220] For oral administration, an excipient and/or binder may be present, such as sucrose, kaolin, glycerin, starch dextrans, cyclodextrins, sodium alginate, ethyl cellulose, and carboxy methylcellulose. Sweetening agents, preservatives, dye/colorant, flavor enhancer, or any combination thereof may optionally be present. A coating shell may also optionally be used.

[0221] In a composition intended to be administered by injection, one or more of a surfactant, preservative, wetting agent, dispersing agent, suspending agent, buffer, stabilizer, isotonic agent, or any combination thereof may optionally be included.

[0222] For nucleic acid-based formulations, or for formulations comprising expression products according to this disclosure, about 0.01 μg/kg to about 100 mg/kg body weight will be administered, for example, by the intradermal, subcutaneous, intramuscular, or intravenous route, or by any route known in the art to be suitable under a given set of circumstances. A preferred dosage, for example, is about 1 μg/kg to about 20 mg/kg, with about 5 μg/kg to about 10 mg/kg particularly preferred. It will be evident to those skilled in the art that the number and frequency of administration will be dependent upon the response of the host.

[0223] The pharmaceutical compositions of this disclosure may be in any form that allows for administration to a patient, such as, for example, in the form of a solid, liquid, or gas (aerosol). The composition may be in the form of a liquid, e.g., an elixir, syrup, solution, emulsion or suspension, for administration by any route described herein.

[0224] A liquid pharmaceutical composition as used herein, whether in the form of a solution, suspension or other like form, may include one or more of the following components: sterile diluents such as water for injection, saline solution (e.g., physiological saline), Ringer's solution, isotonic sodium chloride, fixed oils such as synthetic mono- or digylcerides that may serve as the solvent or suspending medium, polyethylene glycols, glycerin, propylene glycol or other solvents; antibacterial agents such as benzyl alcohol or methyl paraben; antioxidants such as ascorbic acid or sodium bisulfite; buffers such as acetates, citrates or phosphates; chelating agents such as ethylenediaminetetraacetic acid; and agents for the adjustment of tonicity such as sodium, chloride, or dextrose. The parenteral preparation can be enclosed in ampoules, disposable syringes or multiple dose vials made of glass or plastic. Physiological saline is a preferred additive. An injectable pharmaceutical composition is preferably sterile.

[0225] It may also be desirable to include other components in the preparation, such as delivery vehicles including aluminum salts, water-in-oil emulsions, biodegradable oil vehicles, oil-in-water emulsions, biodegradable microcapsules, and liposomes. Examples of adjuvants for use in such vehicles include N-acetylmuramyl-L-alanine-D-isoglutamine (MDP), lipopolysaccharides (LPS), glucan, IL-12, GM-CSF, γ-interferon, and IL-15.

[0226] While any suitable carrier known to those of ordinary skill in the art may be employed in the pharmaceutical compositions of this disclosure, the type of carrier will vary depending on the mode of administration and whether a sustained release is desired. For parenteral administration, the carrier may comprise water, saline, alcohol, a fat, a wax, a buffer, or any combination thereof. For oral administration, any of the above carriers or a solid carrier, such as mannitol, lactose, starch, magnesium stearate, sodium saccharine, talcum, cellulose, glucose, sucrose, magnesium carbonate, or any combination thereof, may be employed.

[0227] This disclosure contemplates a dosage unit comprising a pharmaceutical composition of this disclosure. Such dosage units include, for example, a single-dose or a multi-dose vial or syringe, including a two-compartment vial or syringe, one comprising the pharmaceutical composition of this disclosure in lyophilized form and the other a diluent for reconstitution. A multi-dose dosage unit can also be, e.g., a bag or tube for connection to an intravenous infusion device.

[0228] This disclosure also contemplates a kit comprising a pharmaceutical composition in a unit dose or multi-dose container, e.g., a vial, and a set of instructions for administering the composition to patients suffering a disorder as described herein.

[0229] All U.S. patents, U.S. patent application publications, U.S. patent applications, foreign patents, foreign patent applications, non-patent publications, tables, sequences, webpages, or the like referred to in this specification, are incorporated herein by reference, in their entirety. The following examples are intended to illustrate, but not limit, this disclosure.

### EXAMPLES

### Xceptor Sequences

[0230] The amino acid sequences of exemplary multi-specific fusion proteins having a TNFRSF1B ectodomain and an anti-IL6xR binding domain are provided in SEQ ID NO:607-668, with the corresponding nucleotide expression cassettes being provided in SEQ ID NO:673-734, respectively (note the mature proteins will lack the signal peptide sequence found in SEQ ID NOS:607-668). Multi-specific fusion proteins having a TNFRSF1B ectodomain at the amino-terminus and an anti-IL6xR binding domain at the carboxy terminus are referred to herein as TRU(XT6)-1001 to TRU(XT6)-1062. Fusion proteins in the reverse orientation—that is, having an anti-IL6xR binding domain at the amino-terminus and a TNFRSF1B ectodomain at the carboxy terminus—are referred to herein as TRU(X6T)-1008 and TRU(X6T)-1019.

[0231] The amino acid sequences of exemplary multi-specific fusion proteins having a TNFRSF1B ectodomain and a TWEAK, RANKL, IGF1, IL7, IL17 or IGF antagonist binding domain are provided in SEQ ID NO:798-804, with the corresponding nucleotide expression cassettes being provided in SEQ ID NO:80-811, respectively.

[0232] A phage library of Fab binding domains was screened for binding domains specific for an IL6xR complex essentially as described by Hoet et al. (2005) Nature Biotechnol. 23:344. The binding domains were cloned by PCR amplification—briefly, the VL and VH regions from the Fab library clones were amplified using PCR SuperMix (Invitrogen, San Diego, Calif.) and appropriate primers that create the G₄S linker via overlap, with an initial anneal at 56° C. for 9 cycles, then 62° C. for an additional 20 cycles. The PCR products were separated on an agarose gel and purified using a Qiagen (Chatsworth, Calif.) PCR Purification column. The second round sewing reaction involved mixing a molar equivalent of VL and VH products with Expand buffer and water, denatured at 95° C. for 5 sec, then cooled slowly to room temperature. To amplify, a mix of dNTPs were added with Expand enzyme and incubated at 72° C. for 10 sec. The outside primers were added (5′ VH and 3′ VL) and the mix was cycled 35 times with an anneal at 62° C. and a 45 min extension reaction. The resulting 750 base pair product was gel purified, digested with EcoRI and NotI, and cloned into plasmid pD28 (for more details, see US Patent Application Publication No. 2005/0136049 and PCT Application Publication No. WO 2007/146968). Binding activity was examined by ELISA as described in Hoet et al. (2005).

[0233] Various SMIP and Xceptor fusion proteins described herein were tested for activity as described below. Abbreviations used in the following examples include the following terms: PBS-T: PBS, pH 7.2-7.4 and 0.1% Tween®20; Working buffer: PBS-T with 1% BSA; Blocking buffer: PBS-T with 3% BSA.

### Example 1

### Expression of Xceptors

[0234] Expression of certain of the Xceptor fusion proteins disclosed herein in 293 cells was performed using the FreeStyle™ 293 Expression System (Invitrogen, Carlsbad, Calif.) according to the manufacturer's instructions.

[0235] For each 30 ml transfection, 3×10⁷ cells in 28 ml of FreeStyle™ 293 Expression Medium were used. On the day of transfection, a small aliquot of the cell suspension was transferred to a microcentrifuge tube, and the viability and the amount of cell clumping determined using the trypan blue dye exclusion method. The suspension was vigorously vortexed for 45 seconds to break up cell clumps and total cell counts determined using a Coulter Counter or a hemacytometer. The viability of the cells was over 90%. A shaker flask containing the required cells was placed in a 37° C. incubator on an orbital shaker.

[0236] For each transfection sample, lipid-DNA complexes were prepared as follows. 30 μg of plasmid DNA was diluted in Opti-MEM® I to a total volume of 1 ml and mixed gently. 60 μl of 293fectin™ was diluted in Opti-MEM® I to a total volume of 1 ml, mixed gently, and incubated for 5 minutes at room temperature. After the 5 minute incubation, the diluted DNA was added to the diluted 293fectin™ to obtain a total volume of 2 ml and mixed gently. The resulting solution was incubated for 20-30 minutes at room temperature to allow DNA-293fectin™ complexes to form.

[0237] While the DNA-293fectin™ complexes were incubating, the cell suspension was removed from the incubator and the appropriate volume of cell suspension was placed in a sterile, disposable 125 ml Erlenmeyer shaker flasks. Fresh, pre-warmed FreeStyle™ 293 Expression Medium was added up to a total volume of 28 ml for a 30 ml transfection.

[0238] After the DNA-293fectin™ complex incubation was complete, 2 ml of DNA-293fectin™ complex was added to the shaker flasks. 2 ml of Opti-MEM® I was added to the negative control flask, instead of DNA-293fectin™ complex. Each flask contained a total volume of 30 ml, with a final cell density of approximately 1×10⁶ viable cells/ml. The cells were incubated in a 37° C. incubator with a humidified atmosphere of 8% CO₂ in air on an orbital shaker rotating at 125 rpm. Cells were harvested at approximately 7 days post-transfection and assayed for recombinant protein expression.

[0239] Xceptor molecules having a TNFRSF1B ectodomain and either an IL6/HIL6 binding domain, a TWEAKR ectodomain, an OPG ectodomain, an IL7R ectodomain, an IL17R ectodomain or a TGFβRII ectodomain were expressed in 293 cells as described above.

### Example 2

### Xceptor Binding to IL6 and Hyper IL6 by ELISA

[0240] Hyper-IL6 (HIL6 or IL6xR), recombinant human IL6 (rhIL6), and human soluble IL6R binding activity was examined for Xceptors TRU(XT6)-1002, 1019, 1025, 1042, 1058 and TRU(X6T)-1019 (SEQ ID NO:608, 625, 631, 648, 664 and 670, respectively) substantially as follows.

### HIL6 and IL6 Binding

[0241] Added to each well of a 96-well plate was 100 μl goat anti-human IgG-Fc (Jackson ImmunoResearch, West Grove, Pa.) from a 2 μg/ml solution in PBS, pH 7.2-7.4. The plate was covered, and incubated overnight at 4° C. After washing four times with PBS-T, 250 μl Blocking buffer (PBS-T with 3% BSA or 10% normal goat serum) was added to each well, the plate was covered, and incubated at room temperature for 2 hours (or at 4° C. overnight). After washing the plate three times with PBS-T, added in duplicate wells to the anti-human IgG-Fc coated plate was 100 μl/well Xceptor TNFRSF1B::anti-HIL6 samples and human gp130-Fc chimera (R&D Systems, Minneapolis, Minn.) serially diluted three-fold in Working buffer starting at 300 ng/ml, the plate was covered, and incubated at room temperature for about 1 to 2 hours. After washing the plate five times with PBS-T, added in duplicate wells was 100 μl/well human Hyper IL-6 or recombinant human IL-6 from a 150 μM solution in Working buffer, the plate was covered, and incubated at room temperature for about 1 to 2 hours. After washing the plate five times with PBS-T, 100 μl/well anti-human IL-6-biotin (R&D Systems) from a 150 ng/ml solution in Working buffer, the plate was covered, and incubated at room temperature for about 1 to 2 hours. After washing the plate five times with PBS-T, 100 μl per well horse radish peroxidase-conjugated streptavidin (Zymed, San Francisco, Calif.) diluted 1:4,000 in Working buffer was added, the plate was covered, and incubated at room temperature for 30 minutes. After washing the plate six times with PBS-T, 100 μl per well 3,3,5,5-tetramentylbenzidine (TMB) substrate solution (Pierce, Rockford, Ill.) was added for about 3 to 5 minutes and then the reaction was stopped with 50 μl Stop buffer (1N H₂SO₄) per well. The absorbance of each well was read at 450 nm.

sIL6R Binding

[0242] Added to each well of a 96-well plate was 100 μl goat anti-human IgG-Fc (ICN Pharmaceuticals, Costa Mesa, Calif.) from a 2 μg/ml solution in PBS, pH 7.2-7.4. The plates were covered, and incubated overnight at 4° C. After washing four times with PBS-T, 250 μl Blocking buffer (PBS-T with 3% BSA or 10% normal goat serum) was added to each well, the plate was covered, and incubated at room temperature for 2 hours (or at 4° C. overnight). After washing the plate three times with PBS-T, added in duplicate wells to the anti-human IgG-Fc coated plate was 100 μl/well Xceptor TNFRSF1B::anti-HIL6 samples, positive control anti-human IL-6R(R&D Systems, Minneapolis, Minn.) and negative controls human IgG or human gp130-Fc chimera (R&D Systems), each serially diluted three-fold in Working buffer starting at 300 ng/ml, the plate was covered, and incubated at room temperature for about 1 to 2 hours. After washing the plate five times with PBS-T, added in duplicate wells was 100 μl/well recombinant human sIL-6R(R&D Systems) from a 75 μM solution in Working buffer, the plate was covered, and incubated at room temperature for about 1 to 2 hours. After washing the plate five times with PBS-T, added 100 μl/well anti-human IL-6R-biotin (R&D Systems) from a 100 ng/ml solution in Working buffer, the plate was covered, and incubated at room temperature for about 1 to 2 hours. After washing the plate five times with PBS-T, 100 μl per well horse radish peroxidase-conjugated streptavidin (Zymed, San Francisco, Calif.) diluted 1:4,000 in Working buffer was added, the plate was covered, and incubated at room temperature for 30 minutes. After washing the plate six times with PBS-T, 100 μl per well 3,3,5,5-tetramentylbenzidine (TMB) substrate solution (Pierce, Rockford, Ill.) was added for about 3 to 5 minutes and then the reaction was stopped with 50 μl Stop buffer (1N H₂SO₄) per well. The absorbance of each well was read at 450 nm.

[0243] The data in FIGS. 1A and 1B demonstrate that all Xceptor fusion proteins, whether the TNFRSF1B ectodomain was on the amino- or carboxy terminus of the fusion protein molecules, can bind HIL6. Furthermore, these assays show that the Xceptor proteins have specificity for the IL6xR complex because only two of the Xceptors bind rhIL6 (FIG. 1B) and none bind sIL6R (FIG. 1C). In related studies, the xceptor TRU(XT6)-1002 and the SMIP TRU(S6)-1002 were found to cross-react with IL6 from the non-human primate Mucaca mulatta.

### Example 3

### Xceptor Binding to TNF-α by ELISA

[0244] TNF-α binding activity was examined for Xceptors TRU(XT6)-1002, 1042, 1058, 1019 and TRU(X6T)-1019 (SEQ ID NO:608, 648, 664, 625 and 670, respectively) substantially as follows.

[0245] Added to each well of a 96-well plate was 100 μl goat anti-human IgG-Fc (ICN Pharmaceuticals, Costa Mesa, Calif.) from a 2 μg/ml solution in PBS, pH 7.2-7.4. The plate was covered, and incubated overnight at 4° C. After washing four times with PBS-T, 250 μl Blocking buffer was added to each well, the plate was covered, and incubated at room temperature for 2 hours (or at 4° C. overnight). After washing the plate three times with PBS-T, added in duplicate wells to the anti-human IgG-Fc coated plate was 100 μl/well Xceptor TNFRSF1B::anti-HIL6 samples, positive controls Enbrel® (etanercept) and recombinant human TNFR2 (TNFRSF1B)-Fc chimera (R&D Systems, Minneapolis, Minn.), and negative controls human IgG or human gp130-Fc chimera (R&D Systems), each serially diluted three-fold in Working buffer starting at 300 ng/ml, the plate was covered, and incubated at room temperature for about 1 to 2 hours. After washing the plate five times with PBS-T, added in duplicate wells was 100 μl/well recombinant human TNF-α (R&D Systems) from a 2 ng/ml solution in Working buffer, the plate was covered, and incubated at room temperature for about 1 to 2 hours. After washing the plate five times with PBS-T, added 100 μl/well anti-human TNF-α-biotin (R&D Systems) from a 200 ng/ml solution in Working buffer, the plate was covered, and incubated at room temperature for about 1 to 2 hours. After washing the plate five times with PBS-T, 100 μl per well horse radish peroxidase-conjugated streptavidin (Jackson ImmunoResearch, West Grove, Pa.) diluted 1:1,000 in Working buffer was added, the plate was covered, and incubated at room temperature for 30 minutes. After washing the plate six times with PBS-T, 100 μl per well 3,3,5,5-tetramentylbenzidine (TMB) substrate solution (Pierce, Rockford, Ill.) was added for about 3 to 5 minutes and then the reaction was stopped with 50 μl Stop buffer (1N H₂SO₄) per well. The absorbance of each well was read at 450 nm.

[0246] The data in FIG. 2 shows that all Xceptor fusion proteins tested can bind TNF-α, whether the TNFRSF1B ectodomain was on the amino- or carboxy terminus of the fusion protein.

### Example 4

### Xceptor Dual Ligand Binding by ELISA

[0247] Concurrent binding to TNF-α and to IL6xR complex was examined for Xceptor fusion protein TRU(XT6)-1006 (SEQ ID NO:612), substantially as follows.

[0248] Added to each well of a 96-well plate was 100 μl human HIL-6 solution (5 μg/ml in PBS, pH 7.2-7.4). The plate was covered, and incubated overnight at 4° C. After washing four times with PBS-T, then 250 μl Blocking buffer was added to each well, the plate was covered, and incubated at room temperature for 2 hours (or at 4° C. overnight). After washing the plate three times with PBS-T, added in duplicate wells to the HIL-6 coated plate was 100 μl/well Xceptor TNFRSF1B::HIL6 samples serially diluted three-fold in Working buffer starting at 300 ng/ml. Negative controls included human gp130-Fc chimera (R&D Systems, Minneapolis, Minn.), Enbrel® (etanercept), and Working buffer only. The plate was covered and incubated at room temperature for 1.5 hours. After washing the plate five times with PBS-T, 100 μl per well recombinant human TNF-α (R&D Systems, Minneapolis, Minn.) to 2 ng/ml in Working buffer was added, the plate was covered, and incubated at room temperature for 1.5 hr. After washing the plate five times with PBS-T, 100 μl per well anti-human TNF-α-biotin (R&D Systems) to 200 ng/ml in Working buffer was added, the plate was covered, and incubated at room temperature for 1.5 hr. After washing the plate five times with PBS-T, 100 μl per well horse radish peroxidase-conjugated streptavidin (Jackson ImmunoResearch, West Grove, Pa.) diluted 1:1000 in Working buffer was added, the plate was covered, and incubated at room temperature for 30 minutes. After washing the plate six times with PBS-T, 100 μl per well 3,3,5,5-tetramentylbenzidine (TMB) substrate solution (Pierce, Rockford, Ill.) was added for 3-5 minutes and then the reaction was stopped with 50 μl Stop buffer (1N H₂SO₄) per well. The absorbance of each well was read at 450 nm.

[0249] The data in FIG. 3 demonstrates that Xceptor proteins can bind two ligands simultaneously (in this case TNF-α and Hyper IL6).

### Example 5

### Xceptor Blocking of Hyper IL6 Binding to Gp130 by ELISA

[0250] Blocking of Hyper IL6 (IL6xR) binding to soluble gp130 receptor by Xceptor fusion proteins TRU(XT6)-1004, 1006, 1007, 1008, 1013 and 1019 (SEQ ID NO:610, 612, 613, 614, 619 and 625) was examined substantially as follows.

[0251] Added to each well of a 96-well plate was 100 μl human gp130-Fc chimera (R&D Systems, Minneapolis, Minn.) from a 0.25-0.5 μg/ml solution in PBS, pH 7.2-7.4. The plates were covered, and incubated overnight at 4° C. After washing four times with PBS-T, 250 μl Blocking buffer (PBS-T with 3% BSA or 10% normal goat serum) was added to each well, the plate was covered, and incubated at room temperature for 2 hours (or at 4° C. overnight). Serial five-fold dilutions in Working buffer starting at 50 μg/ml were made of the following samples: Xceptor TNFRSF1B::anti-HIL6 samples, positive controls human gp130-Fc chimera (R&D Systems) and anti-human IL-6R(R&D Systems), and negative controls anti-human IL-6 (R&D Systems), human IgG or Enbrel® (etanercept). Equal volumes of the serially diluted Xceptor samples were mixed with Hyper IL-6 (final Hyper IL-6 concentration of 2.5 ng/ml) and incubated at room temperature for 1 hour. After washing the plate three times with PBS-T, added in duplicate wells to the human gp130-Fc coated plate was 100 μl/well of the serially dilutions of Xceptor/HIL6 mixtures, human gp130-Fc chimera, anti-human IL-6R, anti-human IL-6, human IgG, and Enbrel® (etanercept), the plate was covered, and incubated at room temperature for about 1.5 hours. After washing the plate five times with PBS-T, 100 μl per well horse radish peroxidase-conjugated anti-mouse IgG-Fc (Pierce, Rockford, Ill.) diluted 1:10,000 in Working buffer was added, the plate was covered, and incubated at room temperature for 1 hour. After washing the plate six times with PBS-T, 100 μl per well 3,3,5,5-tetramentylbenzidine (TMB) substrate solution (Pierce) was added for about 5 to 15 minutes and then the reaction was stopped with 50 μl Stop buffer (1N H₂SO₄) per well. The absorbance of each well was read at 450 nm.

[0252] The data in FIG. 4 demonstrate that Xceptor proteins comprising an anti-IL6xR binding domain can block soluble gp130 from binding to HIL6.

### Example 6

### Xceptor Blocking of IL6 and Hyper IL6 Induced Cell Proliferation

[0253] Blocking of IL6 or Hyper IL6 (IL6xR) induced cell proliferation of TF-1 cells was examined for Xceptor fusion proteins TRU(XT6)-1011, 1014, 1025, 1026, 1002, and TRU(X6T)-1019 (SEQ ID NO:617, 620, 631, 632, 608 and 670) substantially as follows.

[0254] Added to each well of a 96-well flat bottom plate were 0.3×10⁶ TF-1 cells (human erythroleukemia cells) in the fresh growth medium (10% FBS-RPMI 1640; 2 mM L-glutamine; 100 units/ml penicillin; 100 μg/ml streptomycin; 10 mM HEPES; 1 mM sodium pyruvate; and 2 ng/ml Hu GM-CSF) one day before use in proliferation assay. The cells were then harvested and washed twice with assay medium (same as growth medium except without GM-CSF, cytokine-free), then resuspended at 1×10⁵ cells/ml in assay medium. For blocking IL-6 activity, serial dilutions of a TNFSFR1B::anti-HIL-6 Xceptor of interest or antibody was pre-incubated with a fixed concentration of recombinant human IL-6 (rhIL-6) (R&D Systems, Minneapolis, Minn.) or hyper IL-6 (HIL-6) in 96-well plates for 1 hour at 37° C., 5% CO₂. Controls used included human IgG; human gp130-Fc chimera (R&D Systems); anti-hIL-6 antibody (R&D Systems); and anti-hIL-6R antibody (R&D Systems). After the pre-incubation period, 1×10⁴1 cells (in 100 μl) was added to each well. The final assay mixture, in a total volume of 200 μl/well, containing TNFSFR1B::HIL-6, rhIL-6, or HIL-6 and cells was incubated at 37° C., 5% CO₂ for 72 hours. During the last 4-6 hours of culture, ³H-thymidine (20 μCi/ml in assay medium, 25 μL1/well) was added. The cells were harvested onto UniFilter-96 GF/c plates and incorporated ³H-Thymidine was determined using TopCount reader (Packard). The data are presented as the Mean of cpm±SD of triplicates. The percentage of blocking=100−(test cpm−control cpm/maximum cpm−control cpm)*100.

[0255] The data in FIGS. 5A and 5B demonstrate that all Xceptor proteins, whether the TNFRSF1B ectodomain was on the amino- or carboxy-terminus of the fusion protein molecules, can block cell proliferation induced by IL6 or Hyper IL6, respectively, or both.

### Example 7

### Xceptor Blocking of TNF-α Binding to TNFR by ELISA

[0256] Blocking of TNF-α binding to TNF receptor by Xceptor fusion proteins TRU(XT6)-1004, 1006, 1007, 1008, 1013 and 1019 (SEQ ID NOS:610, 612, 613, 614, 619 and 625, respectively) was examined substantially as follows.

[0257] Added to each well of a 96-well plate was 100 μl recombinant human TNFR2-Fc chimera (R&D Systems, Minneapolis, Minn.) from a 0.25-0.5 μg/ml solution in PBS, pH 7.2-7.4. The plates were covered, and incubated overnight at 4° C. After washing four times with PBS-T, 250 μl Blocking buffer (PBS-T with 3% BSA or 10% normal goat serum) was added to each well, the plate was covered, and incubated at room temperature for 2 hours (or at 4° C. overnight). Serial five-fold dilutions in Working buffer starting at 50 to 250 μM were made of the following samples: Xceptor TNFRSF1B::anti-HIL6 samples, positive controls Enbrel® (etanercept) and anti-TNF-α (R&D Systems), and negative controls human gp130-Fc chimera (R&D Systems) and human IgG. Equal volumes of the serially diluted Xceptor samples were mixed with TNFα (final TNFα concentration of 2.5 ng/ml) and incubated at room temperature for 1 hour. After washing the plate three times with PBS-T, added in duplicate wells to the recombinant human TNFR2-Fc coated plate was 100 μl/well of the serially dilutions of Xceptor/TNFα mixture, Enbrel® (etanercept), anti-TNFα, human gp130-Fc chimera, and human IgG, the plate was covered, and incubated at room temperature for about 1.5 hours. After washing the plate five times with PBS-T, 100 μl per well of anti-human TNFα-biotin (R&D Systems) from a 200 ng/ml solution in Working buffer was added, the plate was covered, and incubated at room temperature for 1 to 2 hours. After washing the plate five times with PBS-T, 100 μl per well horse radish peroxidase-conjugated streptavidin (Jackson ImmunoResearch, West Grove, Pa.) diluted 1:1,000 in Working buffer was added, the plate was covered, and incubated at room temperature for 30 minutes. After washing the plate six times with PBS-T, 100 μl per well 3,3,5,5-tetramentylbenzidine (TMB) substrate solution (Pierce, Rockford, Ill.) was added for about 3 to 5 minutes and then the reaction was stopped with 50 μl Stop buffer (1N H₂SO₄) per well. The absorbance of each well was read at 450 nm.

[0258] The data in FIG. 6 show that Xceptor proteins blocked TNF-α binding to TNF receptor, which was approximately equivalent to blocking by TNFR-Fc.

### Example 8

### Xceptor Blocking of TNF-α Induced Cell Killing

[0259] Blocking of TNF-α induced killing of L929 cells was examined for Xceptor fusion proteins TRU(XT6)-1011, 1014, 1025, 1026, 1002 and TRU(X6T)-1019 (SEQ ID NO:617, 620, 631, 632, 608 and 670, respectively) substantially as follows.

[0260] A suspension of L929 mouse fibroblast cells (ATCC, Manassas, Va.) was prepared at a density of 2×10⁵ cells/ml in culture medium (10% FBS-RPMI 1640; 2 mM L-glutamine; 100 units/ml penicillin; 100 μg/ml streptomycin; and 10 mM HEPES), then 100 μl was added to each well of a 96-well flat bottom black plate and incubated overnight at 37° C., 5% CO₂ in a humidified incubator. Xceptor TNFRSF1B::anti-HIL6 samples serially diluted in assay medium (same as culture medium but supplemented with 2% FBS) were mixed with an equal volume of recombinant human TNF-α (rhTNFα; R&D Systems, Minneapolis, Minn.), and incubated at 37° C., 5% CO₂ in a humidified incubator for 1 hour. Positive controls (i.e., those agents that block TNFα induced killing of L929 cells) included Enbrel® (etanercept), rhTNFR2-Fc chimera (R&D Systems, Minneapolis, Minn.), and anti-TNFα antibody (R&D Systems, Minneapolis, Minn.). Negative controls included assay medium alone (no TNF-α added) and antibody hIgG (with TNFα added). To analyze TNFα activity, culture medium was removed from the L929 cells and then each well received 50 μl of a TNFα/Xceptor or control mixture, and 50 μl actinomycin D (Sigma-Aldrich, St. Louis, Mo.) (from a freshly prepared working solution of 4 μg/ml). The cells were then incubated for 24 hrs at 37° C., 5% CO₂ in a humidified incubator. To measure cell viability, added to each well was 100 μl ATPlite 1 Step Reagent (PerkinElmer, Waltham, Mass.) according to the manufacturer's instructions, shaken for two minutes, and then luminescence is measured using a TopCount reader (Packard).

[0261] The data in FIG. 7 demonstrate that all Xceptor proteins, whether the TNFRSF1B ectodomain was on the amino- or carboxy terminus of the fusion protein molecules, can block TNF-α induced cell killing in this assay.

### Example 9

### Xceptor Binding to Ligands by ELISA

[0262] The ability of xceptor molecules comprising a TNFRSF1B ectodomain and either a TWEAKR ectodomain (SEQ ID NO:798), an OPG ectodomain (SEQ ID NO:799), a TGFβR11 ectodomain or an IL7R ectodomain (SEQ ID NO:801) to bind to the ligands TWEAK, RANKL, TGFβ or IL7, respectively, was examined substantially as follows.

[0263] Mouse and human ligands (R&D Systems, Minnesota, MN) were added to wells of a 96-well plate at a concentration of 1 μg/ml in PBS (100 μl/well). Plates were incubated at 4° C. overnight. After washing five times with PBS-T, 250 μl Blocking Buffer (PBS-T with 3% BSA) was added to each well, and the plate covered and incubated at room temperature (RT) for 2 hours. Serial three fold dilutions of xceptors were made in Working Buffer (PBS-T with 1% BSA) starting at 300 ng/ml. As a negative control, an irrelevant xceptor was used. The plate was incubated at RT for 1 hour. After washing five times with PBS-T, 100 μl per well of HRP-conjugated anti-human IgG-Fc (1:5000 in Working buffer) was added, the plate covered, and incubated at RT for 1 hour. After washing five times with PBS-T, 100u1 of Quant-Blu substrate (Pierce, Rockford, Ill.) was added to each well. The plate was incubated at RT for 10-30 minutes, and fluorescence measured at 325/420 nm.

[0264] The results of are shown in Table 3 below. The binding of the TNFRxTGFβR11 to mouse TGFβ was not tested, however it is noted that mouse and human TGFβ are 99% identical.

TABLE 3

| | | Mouse ligand | Human ligand |
|---|---|---|---|
| TNFR × R | Ligand | binding | binding |
| TNFR × TWEAKR | TWEAK | +++ | +++ |
| TNFR × OPG | RANKL | +++ | +++ |
| TNFR × TGFβRII | TGFβ | homologous | +++ |
| TNFR × IL7R | IL7 | ND | + |

ND = Not Done

### Example 10

### Xceptor Blocking of Tweak-Induced Cell Killing

[0265] Blocking of TWEAK-induced killing of HT29 cells was examined for an Xceptor comprising a TNFRSF1B ectodomain and a TWEAKR ectodomain (SEQ ID NO:798) using the method described by Nakayama et al. (J. Immunol. 168:734, 2002).

[0266] Briefly, in a 96-well flat-bottom plate, Xceptor samples were serially diluted in culture medium (RPMI with 10% FCS and 1 mM sodium pyruvate) containing 200 ng/ml human TWEAK (R&D Systems, Minneapolis, Minn.) with 100 μL per well and incubated at 37° C., 5% CO₂ in a humidified incubator for 1.5 hours. Negative controls included an irrelevant Xceptor protein (with TWEAK added) and assay medium alone (with and without TWEAK added). After the incubation, 5×10³ HT29 cells (ATCC, Manassas, Va.) in 100 ul culture medium containing 40 ng/ml human IFN-γ (R&D Systems, Minneapolis, Minn.) was added to each well. The plate was then incubated at 37° C., 5% CO₂ in a humidified incubator for 96 hours. To analyze TWEAK activity by measuring cell viability, 100 μL of culture medium was removed from the HT29 cells, and then 10 μL of WST-8 reagent (Dojindo Molecular Technologies, Rockville, Md.) was added to each well. The plate was incubated at 37° C., 5% CO₂ for 2 hours, and the absorbance of each well was read at 450 nm.

[0267] The data in FIG. 8 demonstrate that the xceptor fusion protein containing human TWEAK receptor ectodomain blocked TWEAK-induced cell killing in this assay.

### Example 11

### Xceptor Blocking of Blocking of RANKL-Mediated Osteoclastogenesis

[0268] Blocking of RANKL-mediated osteoclastogenesis in RAW 246.7 cells by an Xceptor comprising a TNFRSF1B ectodomain and an OPG ectodomain (SEQ ID NO:799) was examined using the method of Lee et al. (J. Biol. Chem. 280(33):29929, 2005).

[0269] Briefly, in a 96 well flat-bottom plate, xceptors were serially diluted (50 ul/well) in culture medium (DMEM with 10% FCS) containing 30 ng/ml mRANKL (R&D Systems, Minneapolis, Minn.). The plate was incubated at 37° C., 5% CO₂ in a humidified incubator for 1.5 hours. After incubation, 5×10³ RAW246.7 cells (ATCC, Manassas, Va.) were added to each well in 50 ul of culture medium. The plate was incubated at 37° C., 5% CO₂ in a humidified incubator for 6 days. Negative controls included an irrelevant xceptor protein (with RANKL) and culture medium alone (with and without RANKL).

[0270] After 6 days, osteoclast-generated tartrate-resistant acid phosphatase (TRAP) activity was assayed by ELISA (IDS, Fountain Hills Ariz.). Briefly, 25 ul was removed from each well and added to a prepared micro-titer plate that was coated with an anti-mouse TRAP antibody. 75 ul of 0.9% NaCl, followed by 25 μL of Releasing Reagent was then added to each well. ELISA positive controls of varying amounts of recombinant mouse TRAP and protein were included from the kit. The plate was incubated at room temperature for 1 hour. After washing the plate three times in PBS-T, 100 ul of pNPP substrate solution was added to all wells, and the plate incubated at 37° C. for 2 hours. The reaction in each well was stopped with 25 μL 0.32M NaOH, and the absorbance read at 405 nm.

[0271] The data in FIG. 9 show that the xceptor fusion protein containing human OPG blocked development of osteoclasts as determined by measuring TRAP activity in RANKL-treated RAW 246.7 cells.

### Example 12

### Binding Affinity to TNFα as Measured by BIACORE®

[0272] The ability of the xceptor fusion protein TRU(XT6)-1002 (SEQ ID NO:608) and of Enbrel® to bind TNFα were determined using a Biacore® T100 instrument (GE Healthcare, Piscataway, N.J.) as follows.

[0273] TNFα binders were captured by a monoclonal mouse anti-human Fc, which was covalently conjugated to a carboxylmethyl dextran surface (CM4) via amines using N-ethyl-N′-(3-dimethylaminopropyl)-carbodiimide hydrochloride and N-hydroxysuccinimide. The unoccupied sites of the activated surface were blocked by ethanolamine. The capturing antibody (referred to as anti hFc) binds to the C_{H}2 domain of IgG Fc for all sub-classes and showed no discernible dissociation from the captured TNFα binders during the course of the assay. Every cycle, a given TNFα binder was captured on flow cell 2 at low density (<100RU) and flow cell 4 at high density (>300RU), while flow cells 1 and 3 were used as reference cells. Each cycle, a single concentration (0-8 nM) of TNFα was injected for 525 seconds at 40 microliters per minute. Dissociation time was either 1 minute for 0-4 nM TNFα, or 1 hour for 0 and 8 nM TNFα. At the end of the cycle, the surface was regenerated gently using 3M MgCl₂ which dissociates protein bound to anti hFc capture antibody. The data from the 8 nM TNFα injections over the high density surface were used to calculate the dissociation rate constant, k_{d}. The value of this parameter was then fixed and the data from the low density surface were used to calculate the association rate constant, kₐ and the Rₘₐₓ. This strategy maximizes signal-to-noise for the dissociation phase data and reduces the mass transport limitation for the association phase data. BIAevaluation software was used to perform these analyses. The results of this study are shown in Table 4 below.

[0274] These data demonstrate that the TNFαR portion of the bispecific molecule, TRU(XT6)-1002, binds TNFα with an affinity similar to that of Enbrel®.

TABLE 4

| On Chip | In Solution | kₐ (M⁻¹s⁻¹) | k_{d} (s⁻¹) | K_{D} (pM) |
|---|---|---|---|---|
| 10 mM Enbrel ® | TNFα | 3.1E+07 | 5.3E−05 | 1.7 |
| 10 mM | TNFα | 4.7E+07 | 1.4E−04 | 3.1 |
| TRU(XT6)-1002 | | | | |

### Example 13

### Specificity of Binding to Hyper IL6 and not Other Gp130 Cytokines

[0275] The effect of Xceptor fusion proteins on induction of TF-1 cell proliferation by IL6 and the gp130 cytokines IL-11, leukemia inhibitory factor (LIF), oncostatin M (OSM) and cardiotrophin-1 (CT-1) was examined substantially as follows.

[0276] Added to each well of a 96-well flat bottom plate was 0.3×10⁶ TF-1 cells (human erythroleukemia cells) in fresh growth medium (10% FBS-RPMI 1640, 2 mM L-glutamine, 100 units/ml penicillin, 100 μg/ml streptomycin, 10 mM HEPES, 1 mM sodium pyruvate and 2 ng/ml Hu GM-CSF) one day before use in the proliferation assay. The cells were harvested and washed twice with assay medium (same as growth medium except without GM-CSF, cytokine-free), then resuspended at 1×10⁵ cells/ml in assay medium. For examining blocking of LIF, OSM, and CT-1 activity, serial dilutions of a TNFSFR1B::anti-HIL-6 xceptors TRU(XT6)-1002 (SEQ ID NO:608), TRU(XT6)-1019 (SEQ ID NO:625), TRU(XT6)-1022 (SEQ ID NO:628), and TRU(XT6)-1025 (SEQ ID NO:631) were pre-incubated with a fixed concentration of each gp130 cytokine individually or hyper IL-6 (HIL-6) in 96-well plates for 1 hour at 37° C., 5% CO₂. After the pre-incubation period, 1×10⁴ cells (in 100 μl) were added to each well. The final assay mixture, in a total volume of 200 μl/well, containing TNFSFR1B::HIL-6, gp130 cytokine or HIL-6 and cells, was incubated at 37° C., 5% CO₂ for 72 hours. During the last 4-6 hours of culture, ³H-thymidine (20 μCi/ml in assay medium, 25 μL/well) was added. The cells were harvested onto UniFilter-96 GF/c plates and incorporated ³H-Thymidine was determined using TopCount reader (Packard). The percentage of blocking=100−(test cpm−control cpm/maximum cpm−control cpm)*100.

[0277] The results showed that the xceptor blocked IL6 activity but not IL-11, LIF, OSM or CT-1 (data not shown), and therefore bound to hyper IL6 but had no effect on the other gp130 cytokines tested.

### Example 14

### SMIP and XCEPTOR Binding to IL6R on Liver Cells

[0278] The ability of TRU(S6)-1002, TRU(XT6)-1019 and the anti-IL6 antibody hu-PM1 to bind to IL6R on the liver-derived HepG2 cells was examined as follows.

[0279] HepG2 cells were washed in FACS Buffer and adjusted to 2×10⁶ cells/mL in FACS Buffer (PBS+3% FBS). To wells of a 96-well plate were added 50 μL of this solution (10⁵ cells/well). The plates were held at 37° C. until ready to add diluted test molecules. Serial dilutions of the test molecules were prepared in FACS Buffer to give a 2× working stock which was diluted to 1× when added to cells. The diluted test molecules were added to cells (50 μL/well) and the cells incubated for 20 min on ice. Whole IgG was used as a control. The cells were then washed two times with FACS Buffer and resuspended in phycoerythrin-conjugated goat anti-human antibody (Jackson Labs; diluted 1:200 in FACS Buffer). After being incubated for 20 min on ice in the dark, the cells were washed two times with FACS buffer, resuspended in 200ul PBS and read on a LSRII™ flow cytometer (BD Biosciences, San Jose, Calif.).

[0280] As shown in FIG. 10, TRU(S6)-1002 and TRU(XT6)-1029 showed essentially no binding to HepG2 cells.

### Example 15

### SMIP and XCEPTOR Blocking of IL-6 and TNF Activity in Mice

[0281] The ability of SMIP and Xceptor fusion proteins disclosed herein to block IL-6 or TNF-induced production of serum amyloid A (SAA) protein in mice was examined as described below. SAA is one of the major acute-phase proteins in humans and mice. Prolonged elevation of plasma SAA levels is found in chronic inflammation and leads to amyloidosis which affects the liver, kidney and spleen (Rienhoff et al. (1990) Mol. Biol. Med. 7:287). Both IL-6 and TNF have been shown to induce SAA when administered alone (Benigni et al., (1996) Blood 87:1851; Ramadori et al., (1988) Eur. J. Immunol. 18:1259).

### (a) Blocking of HyperIL-6 Activity

[0282] Female BALB/C mice were injected retro-orbitally with 0.2 ml PBS, or Enbrel® (200 μg), TRU(S6)-1002 (200 μg) or TRU(XT6)-1002 (300 μg or 500 μg) in PBS. One hour later, the mice were injected IP with 0.2 ml PBS or 2 μg human hyper-IL6 in PBS. Mouse serum was collected at 2 hours and 24 hours after the IP injection. The serum concentration of SAA was determined by ELISA, and concentration of sgp130 was determined by a Luminex-based mouse soluble receptor assay. As shown in FIGS. 11 and 12, TRU(S6)-1002 and TRU(XT6)-1002 blocked hyperlL6-induced expression of both sgp130 and SAA.

### (b) Blocking of TNF Activity

[0283] Female BALB/C mice were injected retro-orbitally with 0.2 ml PBS, or Enbrel® (200 μg), TRU(S6)-1002 (200 μg) or TRU(XT6)-1002 (300 μg) in PBS. One hour later, the mice were injected IP with 0.2 ml PBS or 0.5 ug mouse TNF-α in PBS. Mouse serum was collected at 2 hours and 24 hours after the IP injection. The serum concentration of SAA was determined by ELISA, and concentration of sgp130 was determined by a Luminex-based mouse soluble receptor assay. As shown in FIGS. 13A and B, the Xceptor TRU(XT6)-1002 blocked TNFα-induced expression of SAA, with the level of SAA observed at 2 hours post-injection being similar to that seen with Enbrel®.

### Example 16

### Xceptor Activity In Vivo

[0284] The therapeutic efficacy of Xceptor molecules described herein is examined in animal models of disease as described below.

### (a) Multiple Myeloma

[0285] The activity of Xceptor molecules is examined in at least one of two well characterized mouse models of multiple myeloma, namely the 5T2 multiple myeloma (5T2mM) model and the 5T33 multiple myeloma (5T33mM) model. In the 5T33 model, mice are treated with xceptors from the time of injection of tumor cells (prophylactic mode). In the 5T2mM model, mice are treated from the onset of the disease (therapeutic mode). The effect of treatment on tumor development and angiogenesis is assessed in both models, with bone studies also being performed in the 5T2mM model.

[0286] The 5TMM murine model of myeloma was initially developed by Radl et al. (J. Immunol. (1979) 122:609; see also Radl et al., Am. J. Pathol. (1988) 132:593; Radl, J. Immunol. Today (1990) 11:234). Its clinical characteristics resemble the human disease closely: the tumor cells are located in the bone marrow, the serum paraprotein concentration is a measure of disease development, neovascularization is increased in both the 5T2mM and 5T33mM models (Van Valckenborgh et al. Am. J. Pathol. (1988) 132:593), and in certain lines a clear osteolytic bone disease develops. The 5T2mM model includes moderate tumor growth and the development of osteolytic bone lesions. These lesions are associated with a decrease in cancellous bone volume, decreased bone mineral density and increased numbers of osteoclasts (Croucher et al. Blood (2001) 98:3534). The 5T33mM model has a more rapid tumor take and, in addition to the bone marrow, tumor cells also grow in the liver (Vanderkerken et al., Br. J. Cancer (1997) 76:451).

[0287] The 5T2 and 5T33mM models have been extensively characterized. Specific monoclonal antibodies have been raised against the idiotype of both 5T2 and 5T33mM allowing the detection, with great sensitivity, of the serum paraprotein by ELISA, and the specific staining of the tumor cells both by FACS analysis and immunostaining of histological sections (Vanderkerken et al., Br. J. Cancer (1997) 76:451). The sequence analysis of the VH gene enables the detection of cells by RT-PCR and Northern blot analysis (Zhu et al., Immunol. (1998) 93:162). The 5TMM models, which can be used for both in vitro and in vivo experiments, generate a typical MM disease and different methods are available to assess tumor load in the bone marrow, serum paraprotein concentrations, bone marrow angiogenesis (by measuring the microvessel density) and osteolytic bone lesions (by a combination of radiography, densitometry and histomorphometry). The investigation of these latter parameters allow the use of the 5TMM models in a preclinical setting and study of the growth and biology of the myeloma cells in a complete syngeneic microenvironment. Both molecules targeting the MM cells themselves and molecules targeting the bone marrow microenvironment can be studied. Specifically, while the 5T33mM model can be used to study both the microenvironment and the MM cells themselves, the 5T2mM model can also be used to study the myeloma associated bone disease.

[0288] To study the prophylactic efficacy of the Xceptor molecules disclosed herein, C57BL/KaLwR1j mice are injected with 2×10⁶ 5T33 mM cells and with Xceptor on day 0. Mice are sacrificed at day 28 and tumor development is assessed by determining serum paraprotein concentration and the percentage of tumor cells on isolated bone marrow cells (determined by flow cytometry with anti-idiotype antibodies or by cytosmears). The weight of spleen and liver is determined and these organs are fixed in 4% formaldehyde for further analysis. Bone samples are fixed for further processing including CD31 immunostaining on paraffin sections and quantification of microvessel density.

[0289] To study the therapeutic efficacy of the Xceptor molecules disclosed herein, mice are injected with 5T2mM cells on day 0, and Xceptor is administered following the onset of disease, as determined by the presence of detectable levels of serum paraprotein. Mice are sacrificed approximately five weeks following administration of Xceptor, and tumor development is assessed as described above for the prophylactic study. In addition, bone analysis is performed using X-rays to determine the number of bone lesions and trabecular bone area, and TRAP staining to assess the number of osteoclasts.

### (b) Rheumatoid Arthritis

[0290] The therapeutic efficacy of any of the xceptor molecules disclosed herein is examined in at least one of two murine models of rheumatoid arthritis (RA), namely the collagen induced arthritis (CIA) and glucose-6-phosphate isomerase (G6PI) models. Each of these models has been shown to be useful for predicting efficacy of certain classes of therapeutic drugs in RA (see Holmdahl (2000) Arthritis Res. 2:169; Holmdahl (2006) Immunol. Lett. 103:86; Holmdahl (2007) Methods Mol. Med. 136:185; McDevitt, H. (2000) Arthritis Res. 2:85; Kamradt and Schubert (2005) Arthritis Res. Ther. 7:20).

### (i) CIA Model

[0291] The CIA model is the best characterized mouse model of arthritis in terms of its pathogenesis and immunological basis. In addition, it is the most widely used model of RA and, although not perfect for predicting the ability of drugs to inhibit disease in patients, is considered by many to be the model of choice when investigating potential new therapeutics for RA (Jirholt et al. (2001) Arthritis Res. 3:87; Van den Berg, W.B. (2002) Curr. Rheumatol. Rep. 4:232; Rosloniec (2003) Collagen-Induced Arthritis. In Current Protocols in Immunology, eds. Coligan et al., John Wiley & Sons, Inc, Hoboken, N.J.).

[0292] In the CIA model, arthritis is induced by immunization of male DBA/1 mice with collagen II (CII) in Complete Freund's Adjuvant (CFA). Specifically, mice are injected intradermally/subcutaneously with CII in CFA on Day −21 and boosted with CII in Incomplete Freund's Adjuvant (IFA) on Day 0. Mice develop clinical signs of arthritis within days of the boost with CII/IFA. A subset of mice (0% to 10%) immunized with CII/CFA develop signs of arthritis on or around Day 0 without a boost and are excluded from the experiments. In some CIA experiments, the boost is omitted and mice are instead treated with Xceptor or control starting 21 days after immunization with CII/CFA (i.e. the day of first treatment is Day 0).

[0293] Mice are treated with Xceptor, vehicle (PBS), or negative or positive control in a preventative and/or therapeutic regimen. Preventative treatment starts on Day 0 and continues through the peak of disease in control (untreated) mice. Therapeutic treatment starts when the majority of mice show mild signs of arthritis. Enbrel®, which has been shown to have good efficacy in both the CIA and G6PI-induced models of arthritis, is used as a positive control. Data collected in every experiment includes clinical scores and cumulative incidence of arthritis. Clinical signs of arthritis in the CIA model are scored using a scale from 0 to 4 as shown in Table 5 below.

TABLE 5

| Score | Observations |
|---|---|
| 0 | No apparent swelling or redness |
| 1 | Swelling/redness in one to three digits |
| 2 | Redness and/or swelling in more than three digits, mild |
| | swelling extending into the paw, swollen or red ankle, or mild |
| | swelling/redness of forepaw |
| 3 | Swollen paw with mild to moderate redness |
| 4 | Extreme redness and swelling in entire paw |

### (ii) G6PI Model

[0294] In the G6PI model, arthritis is induced by immunization of DBA/1 mice with G6PI in adjuvant (Kamradt and Schubert (2005) Arthritis Res. Ther. 7:20; Schubert et al., (2004) J. Immunol. 172:4503; Bockermann, R. et al. (2005) Arthritis Res. Ther. 7:R1316; Iwanami et al., (2008) Arthritis Rheum. 58:754; Matsumoto et al., (2008) Arthritis Res. Ther. 10:R66). G6PI is an enzyme present in virtually all cells in the body and it is not known why immunization induces a joint specific disease. A number of agents, such as CTLA4-Ig, TNF antagonists (e.g. Enbrel®) and anti-IL6 receptor monoclonal antibody, have been shown to inhibit development of arthritis in the G6PI model.

[0295] Male DBA/1 mice are immunized with G6PI in Complete Freund's Adjuvant (CFA) in order to induce arthritis. Specifically, mice are injected intradermally/subcutaneously with G6PI in CFA on Day 0 and develop clinical signs of arthritis within days of the immunization. As with the CIA model discussed above, mice are treated with xceptor, vehicle (PBS), or negative or positive control in a preventative and/or therapeutic regimen. Preventative treatment starts on Day 0 and continues through the peak of disease in control mice. Therapeutic treatment starts when the majority of mice show mild signs of arthritis. Enbrel®, which has been shown to have good efficacy in both the CIA and G6PI-induced models of arthritis, is used as a positive control. Data collected in every experiment includes clinical scores and cumulative incidence of arthritis. Clinical signs of arthritis in the G6PI model are scored using a scale similar to that employed for the CIA model.

### (c) Polycystic Kidney Disease

[0296] The efficacy of an xceptor fusion protein containing a TNF antagonist, as disclosed herein, in the treatment of polycystic kidney disease is tested in murine models as described in Gattone et al., Nat. Med. (2003) 9:1323; Torres et al., Nat. Med. (2004) 10:363; Wang et al., J. Am. Soc. Nephrol. (2005) 16:846; and Wilson (2008) Curr. Top. Dev. Biol. 84:311.

[0297] While this invention has been described in conjunction with the specific embodiments outlined above, it is evident that many alternatives, modifications and variations will be apparent to those skilled in the art. Accordingly, the embodiments of this disclosure as set forth above are intended to be illustrative, not limiting. Various changes may be made without departing from the spirit and scope of this disclosure as defined in the following claims. All publications referenced herein are incorporated herein by reference as though fully set forth.

[0298] SEQ ID NOS:1-834 are set out in the attached Sequence Listing. The codes for nucleotide sequences used in the attached Sequence Listing, including the symbol “n,” conform to WIPO Standard ST.25 (1998), Appendix 2, Table 1.

The application's sequence listing, which the Patent Office published only in electronic form, follows.

SEQUENCE LISTING (834 sequences)

SEQ ID NO: 1 - protein, 11 aa, Artificial Sequence
  Made in a lab
SGEKLGDIYAS

SEQ ID NO: 2 - protein, 7 aa, Artificial Sequence
  Made in a lab
QDTKRPS

SEQ ID NO: 3 - protein, 8 aa, Artificial Sequence
  Made in a lab
QAWDSSTV

SEQ ID NO: 4 - protein, 14 aa, Artificial Sequence
  Made in a lab
SGTDSDVGGYNHVS

SEQ ID NO: 5 - protein, 7 aa, Artificial Sequence
  Made in a lab
DVDHRPS

SEQ ID NO: 6 - protein, 10 aa, Artificial Sequence
  Made in a lab
SSYRSGSTYV

SEQ ID NO: 7 - protein, 11 aa, Artificial Sequence
  Made in a lab
RASQSISSYLN

SEQ ID NO: 8 - protein, 7 aa, Artificial Sequence
  Made in a lab
AASALQS

SEQ ID NO: 9 - protein, 9 aa, Artificial Sequence
  Made in a lab
QQSYSPPVT

SEQ ID NO: 10 - protein, 11 aa, Artificial Sequence
  Made in a lab
RASQSISSWLA

SEQ ID NO: 11 - protein, 7 aa, Artificial Sequence
  Made in a lab
KASSLES

SEQ ID NO: 12 - protein, 8 aa, Artificial Sequence
  Made in a lab
QQYNSYWT

SEQ ID NO: 13 - protein, 11 aa, Artificial Sequence
  Made in a lab
RASQSVSSYLA

SEQ ID NO: 14 - protein, 7 aa, Artificial Sequence
  Made in a lab
DASNRAT

SEQ ID NO: 15 - protein, 10 aa, Artificial Sequence
  Made in a lab
QQRSNWPPFT

SEQ ID NO: 16 - protein, 11 aa, Artificial Sequence
  Made in a lab
QTSQSIDRYLN

SEQ ID NO: 17 - protein, 7 aa, Artificial Sequence
  Made in a lab
AASSLQS

SEQ ID NO: 18 - protein, 9 aa, Artificial Sequence
  Made in a lab
QQSYRTPRT

SEQ ID NO: 19 - protein, 12 aa, Artificial Sequence
  Made in a lab
RASQSVSSSYLA

SEQ ID NO: 20 - protein, 7 aa, Artificial Sequence
  Made in a lab
GASSRAT

SEQ ID NO: 21 - protein, 10 aa, Artificial Sequence
  Made in a lab
QQYGSSPLWT

SEQ ID NO: 22 - protein, 11 aa, Artificial Sequence
  Made in a lab
RASQSISSYLN

SEQ ID NO: 23 - protein, 7 aa, Artificial Sequence
  Made in a lab
AASSLQS

SEQ ID NO: 24 - protein, 9 aa, Artificial Sequence
  Made in a lab
QQSYSTPRT

SEQ ID NO: 25 - protein, 11 aa, Artificial Sequence
  Made in a lab
RASQSISTSLA

SEQ ID NO: 26 - protein, 8 aa, Artificial Sequence
  Made in a lab
YDASKRAS

SEQ ID NO: 27 - protein, 11 aa, Artificial Sequence
  Made in a lab
QLRINWPPEFT

SEQ ID NO: 28 - protein, 11 aa, Artificial Sequence
  Made in a lab
RASRGVITWLN

SEQ ID NO: 29 - protein, 7 aa, Artificial Sequence
  Made in a lab
GASTLQT

SEQ ID NO: 30 - protein, 9 aa, Artificial Sequence
  Made in a lab
QQTHSFPLT

SEQ ID NO: 31 - protein, 11 aa, Artificial Sequence
  Made in a lab
SGDKLGEKYVS

SEQ ID NO: 32 - protein, 7 aa, Artificial Sequence
  Made in a lab
QDTKRPS

SEQ ID NO: 33 - protein, 9 aa, Artificial Sequence
  Made in a lab
QTWDSDTYV

SEQ ID NO: 34 - protein, 11 aa, Artificial Sequence
  Made in a lab
RASQSISSYLN

SEQ ID NO: 35 - protein, 7 aa, Artificial Sequence
  Made in a lab
AASSLQS

SEQ ID NO: 36 - protein, 9 aa, Artificial Sequence
  Made in a lab
QQSYSTLWT

SEQ ID NO: 37 - protein, 11 aa, Artificial Sequence
  Made in a lab
RASQSVRSYLA

SEQ ID NO: 38 - protein, 7 aa, Artificial Sequence
  Made in a lab
DASNRAT

SEQ ID NO: 39 - protein, 9 aa, Artificial Sequence
  Made in a lab
QQYDNLPLT

SEQ ID NO: 40 - protein, 11 aa, Artificial Sequence
  Made in a lab
RTSQSVATYVN

SEQ ID NO: 41 - protein, 7 aa, Artificial Sequence
  Made in a lab
AASSLQS

SEQ ID NO: 42 - protein, 9 aa, Artificial Sequence
  Made in a lab
QQSYSVPIT

SEQ ID NO: 43 - protein, 11 aa, Artificial Sequence
  Made in a lab
RASQSMSNWLA

SEQ ID NO: 44 - protein, 7 aa, Artificial Sequence
  Made in a lab
DVFTLKS

SEQ ID NO: 45 - protein, 10 aa, Artificial Sequence
  Made in a lab
QQYSDYSGIT

SEQ ID NO: 46 - protein, 13 aa, Artificial Sequence
  Made in a lab
SGSSSNIGSKVVY

SEQ ID NO: 47 - protein, 7 aa, Artificial Sequence
  Made in a lab
RNDQRPS

SEQ ID NO: 48 - protein, 12 aa, Artificial Sequence
  Made in a lab
AAWDDSLSGRWV

SEQ ID NO: 49 - protein, 11 aa, Artificial Sequence
  Made in a lab
RASQSISSWLA

SEQ ID NO: 50 - protein, 7 aa, Artificial Sequence
  Made in a lab
KASGLES

SEQ ID NO: 51 - protein, 9 aa, Artificial Sequence
  Made in a lab
QQYNSYPFT

SEQ ID NO: 52 - protein, 11 aa, Artificial Sequence
  Made in a lab
QASRDISIYLN

SEQ ID NO: 53 - protein, 7 aa, Artificial Sequence
  Made in a lab
GASTLRS

SEQ ID NO: 54 - protein, 9 aa, Artificial Sequence
  Made in a lab
QKYNSAPYT

SEQ ID NO: 55 - protein, 11 aa, Artificial Sequence
  Made in a lab
RASQGISSWLA

SEQ ID NO: 56 - protein, 7 aa, Artificial Sequence
  Made in a lab
AASSLQS

SEQ ID NO: 57 - protein, 9 aa, Artificial Sequence
  Made in a lab
QQANSFPLT

SEQ ID NO: 58 - protein, 11 aa, Artificial Sequence
  Made in a lab
RASQSINTYLA

SEQ ID NO: 59 - protein, 7 aa, Artificial Sequence
  Made in a lab
DASNRAT

SEQ ID NO: 60 - protein, 9 aa, Artificial Sequence
  Made in a lab
QQYGRSRYT

SEQ ID NO: 61 - protein, 11 aa, Artificial Sequence
  Made in a lab
RASQGISNYLA

SEQ ID NO: 62 - protein, 7 aa, Artificial Sequence
  Made in a lab
AASTLQS

SEQ ID NO: 63 - protein, 9 aa, Artificial Sequence
  Made in a lab
QQSDNIPYT

SEQ ID NO: 64 - protein, 13 aa, Artificial Sequence
  Made in a lab
SGSSSNIGSNTVN

SEQ ID NO: 65 - protein, 7 aa, Artificial Sequence
  Made in a lab
SNNQRPS

SEQ ID NO: 66 - protein, 11 aa, Artificial Sequence
  Made in a lab
AAWDDSLNGYV

SEQ ID NO: 67 - protein, 11 aa, Artificial Sequence
  Made in a lab
RASQSISTYLN

SEQ ID NO: 68 - protein, 7 aa, Artificial Sequence
  Made in a lab
EATNLQS

SEQ ID NO: 69 - protein, 9 aa, Artificial Sequence
  Made in a lab
QQANNFPFT

SEQ ID NO: 70 - protein, 13 aa, Artificial Sequence
  Made in a lab
SGSSSNIGGNAVN

SEQ ID NO: 71 - protein, 7 aa, Artificial Sequence
  Made in a lab
SSNHRPS

SEQ ID NO: 72 - protein, 11 aa, Artificial Sequence
  Made in a lab
AAWDDSLNGPL

SEQ ID NO: 73 - protein, 10 aa, Artificial Sequence
  Made in a lab
SGEKLGDRYA

SEQ ID NO: 74 - protein, 7 aa, Artificial Sequence
  Made in a lab
QDTKRPS

SEQ ID NO: 75 - protein, 11 aa, Artificial Sequence
  Made in a lab
AAWDDSLKGVV

SEQ ID NO: 76 - protein, 13 aa, Artificial Sequence
  Made in a lab
SGRSSNIGSNSVN

SEQ ID NO: 77 - protein, 7 aa, Artificial Sequence
  Made in a lab
SNNHRPS

SEQ ID NO: 78 - protein, 11 aa, Artificial Sequence
  Made in a lab
AAWDDSLYQGV

SEQ ID NO: 79 - protein, 11 aa, Artificial Sequence
  Made in a lab
RASQSISSYLN

SEQ ID NO: 80 - protein, 7 aa, Artificial Sequence
  Made in a lab
AASSLQS

SEQ ID NO: 81 - protein, 9 aa, Artificial Sequence
  Made in a lab
QQYEYFPPT

SEQ ID NO: 82 - protein, 12 aa, Artificial Sequence
  Made in a lab
RASQSVSSSYLA

SEQ ID NO: 83 - protein, 7 aa, Artificial Sequence
  Made in a lab
GASSRAT

SEQ ID NO: 84 - protein, 9 aa, Artificial Sequence
  Made in a lab
QQYGSSSLT

SEQ ID NO: 85 - protein, 11 aa, Artificial Sequence
  Made in a lab
RSSQRISGYLN

SEQ ID NO: 86 - protein, 7 aa, Artificial Sequence
  Made in a lab
AASTLQS

SEQ ID NO: 87 - protein, 9 aa, Artificial Sequence
  Made in a lab
QQSYSPPFT

SEQ ID NO: 88 - protein, 11 aa, Artificial Sequence
  Made in a lab
RASQSISTWLA

SEQ ID NO: 89 - protein, 7 aa, Artificial Sequence
  Made in a lab
KASSLQS

SEQ ID NO: 90 - protein, 9 aa, Artificial Sequence
  Made in a lab
QQYKSYPFT

SEQ ID NO: 91 - protein, 11 aa, Artificial Sequence
  Made in a lab
QASQDIRSYLN

SEQ ID NO: 92 - protein, 7 aa, Artificial Sequence
  Made in a lab
DTVNLQT

SEQ ID NO: 93 - protein, 9 aa, Artificial Sequence
  Made in a lab
QQYEYLPIT

SEQ ID NO: 94 - protein, 11 aa, Artificial Sequence
  Made in a lab
RASQSISNYLN

SEQ ID NO: 95 - protein, 8 aa, Artificial Sequence
  Made in a lab
YAASSLHS

SEQ ID NO: 96 - protein, 9 aa, Artificial Sequence
  Made in a lab
QQSYSTSGT

SEQ ID NO: 97 - protein, 11 aa, Artificial Sequence
  Made in a lab
RASQSISSYLN

SEQ ID NO: 98 - protein, 7 aa, Artificial Sequence
  Made in a lab
AASSLQS

SEQ ID NO: 99 - protein, 9 aa, Artificial Sequence
  Made in a lab
QQSYSTPVT

SEQ ID NO: 100 - protein, 11 aa, Artificial Sequence
  Made in a lab
RASQSIDTYLN

SEQ ID NO: 101 - protein, 7 aa, Artificial Sequence
  Made in a lab
AASSLQS

SEQ ID NO: 102 - protein, 10 aa, Artificial Sequence
  Made in a lab
QQSYSSPGIT

SEQ ID NO: 103 - protein, 11 aa, Artificial Sequence
  Made in a lab
RASQSIGTYLN

SEQ ID NO: 104 - protein, 7 aa, Artificial Sequence
  Made in a lab
GTSSLQR

SEQ ID NO: 105 - protein, 9 aa, Artificial Sequence
  Made in a lab
QQSYTSPPT

SEQ ID NO: 106 - protein, 11 aa, Artificial Sequence
  Made in a lab
SGDQLGGKFTS

SEQ ID NO: 107 - protein, 7 aa, Artificial Sequence
  Made in a lab
QDTKRPS

SEQ ID NO: 108 - protein, 9 aa, Artificial Sequence
  Made in a lab
LVWDSNTYV

SEQ ID NO: 109 - protein, 11 aa, Artificial Sequence
  Made in a lab
GGNNIGSKSVH

SEQ ID NO: 110 - protein, 7 aa, Artificial Sequence
  Made in a lab
DDSDRPS

SEQ ID NO: 111 - protein, 11 aa, Artificial Sequence
  Made in a lab
QVWDSSGGLQV

SEQ ID NO: 112 - protein, 11 aa, Artificial Sequence
  Made in a lab
RASQSISSWLA

SEQ ID NO: 113 - protein, 7 aa, Artificial Sequence
  Made in a lab
KASNLES

SEQ ID NO: 114 - protein, 9 aa, Artificial Sequence
  Made in a lab
QQYNAYPFI

SEQ ID NO: 115 - protein, 11 aa, Artificial Sequence
  Made in a lab
RASQSISSWLA

SEQ ID NO: 116 - protein, 7 aa, Artificial Sequence
  Made in a lab
KASSLES

SEQ ID NO: 117 - protein, 8 aa, Artificial Sequence
  Made in a lab
QQYKSYWT

SEQ ID NO: 118 - protein, 13 aa, Artificial Sequence
  Made in a lab
SGSPSNIGSNSVN

SEQ ID NO: 119 - protein, 7 aa, Artificial Sequence
  Made in a lab
YDDLVPS

SEQ ID NO: 120 - protein, 11 aa, Artificial Sequence
  Made in a lab
AAWDDRLNGWV

SEQ ID NO: 121 - protein, 11 aa, Artificial Sequence
  Made in a lab
RASQGISSWLA

SEQ ID NO: 122 - protein, 7 aa, Artificial Sequence
  Made in a lab
AASSLQS

SEQ ID NO: 123 - protein, 9 aa, Artificial Sequence
  Made in a lab
QQANSFPLT

SEQ ID NO: 124 - protein, 11 aa, Artificial Sequence
  Made in a lab
RASQSISSYLN

SEQ ID NO: 125 - protein, 7 aa, Artificial Sequence
  Made in a lab
AASSLQS

SEQ ID NO: 126 - protein, 9 aa, Artificial Sequence
  Made in a lab
QQSYSTPYT

SEQ ID NO: 127 - protein, 12 aa, Artificial Sequence
  Made in a lab
RASQSVSSSYLA

SEQ ID NO: 128 - protein, 7 aa, Artificial Sequence
  Made in a lab
GASNRVT

SEQ ID NO: 129 - protein, 8 aa, Artificial Sequence
  Made in a lab
HQYGSQYT

SEQ ID NO: 130 - protein, 11 aa, Artificial Sequence
  Made in a lab
QASQHISNFLN

SEQ ID NO: 131 - protein, 7 aa, Artificial Sequence
  Made in a lab
DTSNLRS

SEQ ID NO: 132 - protein, 9 aa, Artificial Sequence
  Made in a lab
QQYDNFPLT

SEQ ID NO: 133 - protein, 13 aa, Artificial Sequence
  Made in a lab
SGSTSNIGNNAVI

SEQ ID NO: 134 - protein, 7 aa, Artificial Sequence
  Made in a lab
YDDLLPS

SEQ ID NO: 135 - protein, 11 aa, Artificial Sequence
  Made in a lab
ASWDDNLNGPL

SEQ ID NO: 136 - protein, 11 aa, Artificial Sequence
  Made in a lab
RASQSISSWLA

SEQ ID NO: 137 - protein, 7 aa, Artificial Sequence
  Made in a lab
QASTLES

SEQ ID NO: 138 - protein, 9 aa, Artificial Sequence
  Made in a lab
QQANSFPIT

SEQ ID NO: 139 - protein, 11 aa, Artificial Sequence
  Made in a lab
QASQDITNYLN

SEQ ID NO: 140 - protein, 7 aa, Artificial Sequence
  Made in a lab
DASNLQT

SEQ ID NO: 141 - protein, 9 aa, Artificial Sequence
  Made in a lab
QQYDTLHPS

SEQ ID NO: 142 - protein, 14 aa, Artificial Sequence
  Made in a lab
TGTSSDVGVYDSVS

SEQ ID NO: 143 - protein, 7 aa, Artificial Sequence
  Made in a lab
DVSDRPS

SEQ ID NO: 144 - protein, 10 aa, Artificial Sequence
  Made in a lab
GSYRASSSYV

SEQ ID NO: 145 - protein, 11 aa, Artificial Sequence
  Made in a lab
RASQNIYHYLH

SEQ ID NO: 146 - protein, 7 aa, Artificial Sequence
  Made in a lab
AASTLES

SEQ ID NO: 147 - protein, 9 aa, Artificial Sequence
  Made in a lab
QQTYDTPLT

SEQ ID NO: 148 - protein, 11 aa, Artificial Sequence
  Made in a lab
SGDKLGEKFAS

SEQ ID NO: 149 - protein, 7 aa, Artificial Sequence
  Made in a lab
QDSKRPS

SEQ ID NO: 150 - protein, 10 aa, Artificial Sequence
  Made in a lab
QAWGGSTAYV

SEQ ID NO: 151 - protein, 11 aa, Artificial Sequence
  Made in a lab
RASQSVTTYLA

SEQ ID NO: 152 - protein, 7 aa, Artificial Sequence
  Made in a lab
DASNRAT

SEQ ID NO: 153 - protein, 11 aa, Artificial Sequence
  Made in a lab
QQRSNWPPSIT

SEQ ID NO: 154 - protein, 14 aa, Artificial Sequence
  Made in a lab
TGTSSDVGSYNLVS

SEQ ID NO: 155 - protein, 7 aa, Artificial Sequence
  Made in a lab
EGSKRPS

SEQ ID NO: 156 - protein, 10 aa, Artificial Sequence
  Made in a lab
CSYAGRSTYV

SEQ ID NO: 157 - protein, 11 aa, Artificial Sequence
  Made in a lab
SGNRLEDKYVH

SEQ ID NO: 158 - protein, 7 aa, Artificial Sequence
  Made in a lab
QDNKRPS

SEQ ID NO: 159 - protein, 10 aa, Artificial Sequence
  Made in a lab
QAWDSSTREV

SEQ ID NO: 160 - protein, 11 aa, Artificial Sequence
  Made in a lab
RASQGVSDWLA

SEQ ID NO: 161 - protein, 7 aa, Artificial Sequence
  Made in a lab
GASSLQT

SEQ ID NO: 162 - protein, 9 aa, Artificial Sequence
  Made in a lab
QQAHSFPFT

SEQ ID NO: 163 - protein, 11 aa, Artificial Sequence
  Made in a lab
RASQNINTHLA

SEQ ID NO: 164 - protein, 7 aa, Artificial Sequence
  Made in a lab
GASTRAT

SEQ ID NO: 165 - protein, 10 aa, Artificial Sequence
  Made in a lab
QQYGSSLTWT

SEQ ID NO: 166 - protein, 12 aa, Artificial Sequence
  Made in a lab
RASQSVSGNYLA

SEQ ID NO: 167 - protein, 7 aa, Artificial Sequence
  Made in a lab
GASSRAT

SEQ ID NO: 168 - protein, 9 aa, Artificial Sequence
  Made in a lab
LQHNSYPLT

SEQ ID NO: 169 - protein, 11 aa, Artificial Sequence
  Made in a lab
GGINIGSKSVH

SEQ ID NO: 170 - protein, 8 aa, Artificial Sequence
  Made in a lab
YFDSDRPS

SEQ ID NO: 171 - protein, 11 aa, Artificial Sequence
  Made in a lab
QVWDSRSDQYV

SEQ ID NO: 172 - protein, 11 aa, Artificial Sequence
  Made in a lab
RASQSISSWLA

SEQ ID NO: 173 - protein, 7 aa, Artificial Sequence
  Made in a lab
KASTLES

SEQ ID NO: 174 - protein, 9 aa, Artificial Sequence
  Made in a lab
QQYNSYSLT

SEQ ID NO: 175 - protein, 11 aa, Artificial Sequence
  Made in a lab
RASQSISSYLN

SEQ ID NO: 176 - protein, 7 aa, Artificial Sequence
  Made in a lab
AASSLQS

SEQ ID NO: 177 - protein, 9 aa, Artificial Sequence
  Made in a lab
QQSYSTPLT

SEQ ID NO: 178 - protein, 11 aa, Artificial Sequence
  Made in a lab
RASQSINNYLN

SEQ ID NO: 179 - protein, 7 aa, Artificial Sequence
  Made in a lab
TASTLHS

SEQ ID NO: 180 - protein, 9 aa, Artificial Sequence
  Made in a lab
QQSYATLRT

SEQ ID NO: 181 - protein, 14 aa, Artificial Sequence
  Made in a lab
SGSSSDVGHYDYVS

SEQ ID NO: 182 - protein, 7 aa, Artificial Sequence
  Made in a lab
DVSNRPS

SEQ ID NO: 183 - protein, 10 aa, Artificial Sequence
  Made in a lab
SSYTSSGTRV

SEQ ID NO: 184 - protein, 11 aa, Artificial Sequence
  Made in a lab
RASQSVNNWVA

SEQ ID NO: 185 - protein, 7 aa, Artificial Sequence
  Made in a lab
AASSLQS

SEQ ID NO: 186 - protein, 9 aa, Artificial Sequence
  Made in a lab
QQSYSMPLT

SEQ ID NO: 187 - protein, 5 aa, Artificial Sequence
  Made in a lab
KYSMH

SEQ ID NO: 188 - protein, 17 aa, Artificial Sequence
  Made in a lab
SIWPSGGWTTYADSVKG

SEQ ID NO: 189 - protein, 9 aa, Artificial Sequence
  Made in a lab
GGYYYALDY

SEQ ID NO: 190 - protein, 5 aa, Artificial Sequence
  Made in a lab
FYQMH

SEQ ID NO: 191 - protein, 17 aa, Artificial Sequence
  Made in a lab
GIYPSGGYTKYADSVKG

SEQ ID NO: 192 - protein, 13 aa, Artificial Sequence
  Made in a lab
DLGYGSSWYYFDY

SEQ ID NO: 193 - protein, 5 aa, Artificial Sequence
  Made in a lab
KYSMH

SEQ ID NO: 194 - protein, 16 aa, Artificial Sequence
  Made in a lab
GISPSGYTRYADSVKG

SEQ ID NO: 195 - protein, 9 aa, Artificial Sequence
  Made in a lab
DQLLEAFDI

SEQ ID NO: 196 - protein, 5 aa, Artificial Sequence
  Made in a lab
EYPMN

SEQ ID NO: 197 - protein, 17 aa, Artificial Sequence
  Made in a lab
GIYSSGGLTKYADSVKG

SEQ ID NO: 198 - protein, 10 aa, Artificial Sequence
  Made in a lab
DHYGDYAFDY

SEQ ID NO: 199 - protein, 5 aa, Artificial Sequence
  Made in a lab
LYEMV

SEQ ID NO: 200 - protein, 17 aa, Artificial Sequence
  Made in a lab
GIWPSGGWTQYADSVKG

SEQ ID NO: 201 - protein, 17 aa, Artificial Sequence
  Made in a lab
DLAVAGWDYYYYYGMDV

SEQ ID NO: 202 - protein, 5 aa, Artificial Sequence
  Made in a lab
QYNMI

SEQ ID NO: 203 - protein, 16 aa, Artificial Sequence
  Made in a lab
WISSSGGTEYADSVKG

SEQ ID NO: 204 - protein, 17 aa, Artificial Sequence
  Made in a lab
DRGYGSGSYGAYDAFDI

SEQ ID NO: 205 - protein, 5 aa, Artificial Sequence
  Made in a lab
HYSMG

SEQ ID NO: 206 - protein, 17 aa, Artificial Sequence
  Made in a lab
SIYPSGGSTLYADSVKG

SEQ ID NO: 207 - protein, 9 aa, Artificial Sequence
  Made in a lab
WGVGATFDY

SEQ ID NO: 208 - protein, 5 aa, Artificial Sequence
  Made in a lab
HYMMA

SEQ ID NO: 209 - protein, 17 aa, Artificial Sequence
  Made in a lab
YIYPSGGWTSYADSVKG

SEQ ID NO: 210 - protein, 9 aa, Artificial Sequence
  Made in a lab
FDYTIGFDF

SEQ ID NO: 211 - protein, 5 aa, Artificial Sequence
  Made in a lab
HYGMT

SEQ ID NO: 212 - protein, 17 aa, Artificial Sequence
  Made in a lab
GIRSSGGVTNYADSVKG

SEQ ID NO: 213 - protein, 11 aa, Artificial Sequence
  Made in a lab
EGSGWSKAFDI

SEQ ID NO: 214 - protein, 5 aa, Artificial Sequence
  Made in a lab
HYNMR

SEQ ID NO: 215 - protein, 17 aa, Artificial Sequence
  Made in a lab
SISPSGGFTGYADSVKG

SEQ ID NO: 216 - protein, 18 aa, Artificial Sequence
  Made in a lab
GINYYDSSGYYPPVGMDV

SEQ ID NO: 217 - protein, 5 aa, Artificial Sequence
  Made in a lab
WYNML

SEQ ID NO: 218 - protein, 17 aa, Artificial Sequence
  Made in a lab
SISPSGGYTVYADSVKG

SEQ ID NO: 219 - protein, 14 aa, Artificial Sequence
  Made in a lab
DRGGSPFRPDAFDI

SEQ ID NO: 220 - protein, 5 aa, Artificial Sequence
  Made in a lab
EYDML

SEQ ID NO: 221 - protein, 17 aa, Artificial Sequence
  Made in a lab
SIWPSGGFTQYADSVKG

SEQ ID NO: 222 - protein, 16 aa, Artificial Sequence
  Made in a lab
NYYDFWSGPYYYGMDV

SEQ ID NO: 223 - protein, 5 aa, Artificial Sequence
  Made in a lab
GYVMG

SEQ ID NO: 224 - protein, 17 aa, Artificial Sequence
  Made in a lab
SISPSGGYTLYADSVKG

SEQ ID NO: 225 - protein, 13 aa, Artificial Sequence
  Made in a lab
AFSTRWYWGAFDI

SEQ ID NO: 226 - protein, 5 aa, Artificial Sequence
  Made in a lab
IYHMN

SEQ ID NO: 227 - protein, 17 aa, Artificial Sequence
  Made in a lab
GISSSGGRTNYADSVKG

SEQ ID NO: 228 - protein, 16 aa, Artificial Sequence
  Made in a lab
SYRAAGWVDYYYGMDV

SEQ ID NO: 229 - protein, 5 aa, Artificial Sequence
  Made in a lab
LYDMH

SEQ ID NO: 230 - protein, 17 aa, Artificial Sequence
  Made in a lab
RIYSSGGTTQYADSVKG

SEQ ID NO: 231 - protein, 12 aa, Artificial Sequence
  Made in a lab
DPGYGSHHSFDY

SEQ ID NO: 232 - protein, 5 aa, Artificial Sequence
  Made in a lab
SYYMT

SEQ ID NO: 233 - protein, 17 aa, Artificial Sequence
  Made in a lab
GIYSSGGPTQYADSVKG

SEQ ID NO: 234 - protein, 8 aa, Artificial Sequence
  Made in a lab
AGGDAFDI

SEQ ID NO: 235 - protein, 5 aa, Artificial Sequence
  Made in a lab
SYEMF

SEQ ID NO: 236 - protein, 17 aa, Artificial Sequence
  Made in a lab
SISPSGGYTYYADSVKG

SEQ ID NO: 237 - protein, 9 aa, Artificial Sequence
  Made in a lab
MTTSGFHLI

SEQ ID NO: 238 - protein, 5 aa, Artificial Sequence
  Made in a lab
DYPMQ

SEQ ID NO: 239 - protein, 17 aa, Artificial Sequence
  Made in a lab
WIGPSGGWTVYADSVKG

SEQ ID NO: 240 - protein, 8 aa, Artificial Sequence
  Made in a lab
DDGIAGFL

SEQ ID NO: 241 - protein, 5 aa, Artificial Sequence
  Made in a lab
WYLMH

SEQ ID NO: 242 - protein, 17 aa, Artificial Sequence
  Made in a lab
GIWPSGGHTLYADSVKG

SEQ ID NO: 243 - protein, 16 aa, Artificial Sequence
  Made in a lab
EPLLWFGELSYNWFDP

SEQ ID NO: 244 - protein, 6 aa, Artificial Sequence
  Made in a lab
YYENMA

SEQ ID NO: 245 - protein, 17 aa, Artificial Sequence
  Made in a lab
GIYPSGGLTYYADSVKG

SEQ ID NO: 246 - protein, 13 aa, Artificial Sequence
  Made in a lab
SRRYYDSSDAFDI

SEQ ID NO: 247 - protein, 5 aa, Artificial Sequence
  Made in a lab
TYVMY

SEQ ID NO: 248 - protein, 17 aa, Artificial Sequence
  Made in a lab
GIGPSGGNTFYADSVKG

SEQ ID NO: 249 - protein, 14 aa, Artificial Sequence
  Made in a lab
DPGDFWSGYYGMDV

SEQ ID NO: 250 - protein, 5 aa, Artificial Sequence
  Made in a lab
FYGMA

SEQ ID NO: 251 - protein, 17 aa, Artificial Sequence
  Made in a lab
SIYPSGGYTDYADSVKG

SEQ ID NO: 252 - protein, 13 aa, Artificial Sequence
  Made in a lab
SAGGWIGGGAFDI

SEQ ID NO: 253 - protein, 5 aa, Artificial Sequence
  Made in a lab
KYPMM

SEQ ID NO: 254 - protein, 17 aa, Artificial Sequence
  Made in a lab
YIYPSGGKTAYADSVKG

SEQ ID NO: 255 - protein, 17 aa, Artificial Sequence
  Made in a lab
YGSGSYYLYYYYYYMDV

SEQ ID NO: 256 - protein, 5 aa, Artificial Sequence
  Made in a lab
WYSMW

SEQ ID NO: 257 - protein, 17 aa, Artificial Sequence
  Made in a lab
YIVPSGGETIYADSVKG

SEQ ID NO: 258 - protein, 16 aa, Artificial Sequence
  Made in a lab
NLGEGFWSDYYPPLDY

SEQ ID NO: 259 - protein, 5 aa, Artificial Sequence
  Made in a lab
HYGMH

SEQ ID NO: 260 - protein, 15 aa, Artificial Sequence
  Made in a lab
SIYPGMTQYADSVKG

SEQ ID NO: 261 - protein, 11 aa, Artificial Sequence
  Made in a lab
DRGSGIDAFDI

SEQ ID NO: 262 - protein, 5 aa, Artificial Sequence
  Made in a lab
WYDML

SEQ ID NO: 263 - protein, 17 aa, Artificial Sequence
  Made in a lab
VISPSGGRTFYADSVKG

SEQ ID NO: 264 - protein, 16 aa, Artificial Sequence
  Made in a lab
TRSMYSSSWYGAPPTH

SEQ ID NO: 265 - protein, 5 aa, Artificial Sequence
  Made in a lab
WYKMH

SEQ ID NO: 266 - protein, 17 aa, Artificial Sequence
  Made in a lab
GISSSGGLTKYADSVKG

SEQ ID NO: 267 - protein, 11 aa, Artificial Sequence
  Made in a lab
ERRGDGGAFDI

SEQ ID NO: 268 - protein, 5 aa, Artificial Sequence
  Made in a lab
EYTMY

SEQ ID NO: 269 - protein, 17 aa, Artificial Sequence
  Made in a lab
YISPSGGTTNYADSVKG

SEQ ID NO: 270 - protein, 13 aa, Artificial Sequence
  Made in a lab
GAWGDIYYYGMDV

SEQ ID NO: 271 - protein, 5 aa, Artificial Sequence
  Made in a lab
SYWMH

SEQ ID NO: 272 - protein, 17 aa, Artificial Sequence
  Made in a lab
SIYPSGGSTEYADSVKG

SEQ ID NO: 273 - protein, 6 aa, Artificial Sequence
  Made in a lab
GIWFDP

SEQ ID NO: 274 - protein, 5 aa, Artificial Sequence
  Made in a lab
RYGMM

SEQ ID NO: 275 - protein, 17 aa, Artificial Sequence
  Made in a lab
YISSSGGFTRYADSVKG

SEQ ID NO: 276 - protein, 12 aa, Artificial Sequence
  Made in a lab
VGGYSYGPHFDF

SEQ ID NO: 277 - protein, 5 aa, Artificial Sequence
  Made in a lab
WYHMI

SEQ ID NO: 278 - protein, 17 aa, Artificial Sequence
  Made in a lab
WISPSGGFTKYADSVKG

SEQ ID NO: 279 - protein, 14 aa, Artificial Sequence
  Made in a lab
YDSRAAAGTNAFDI

SEQ ID NO: 280 - protein, 5 aa, Artificial Sequence
  Made in a lab
PYKMV

SEQ ID NO: 281 - protein, 17 aa, Artificial Sequence
  Made in a lab
GISPSGGYTYYADSVKG

SEQ ID NO: 282 - protein, 14 aa, Artificial Sequence
  Made in a lab
GGYGWSYYYYGMDV

SEQ ID NO: 283 - protein, 5 aa, Artificial Sequence
  Made in a lab
NYWMY

SEQ ID NO: 284 - protein, 17 aa, Artificial Sequence
  Made in a lab
VISSSGGHTFYADSVKG

SEQ ID NO: 285 - protein, 9 aa, Artificial Sequence
  Made in a lab
DYEGGSNDY

SEQ ID NO: 286 - protein, 5 aa, Artificial Sequence
  Made in a lab
NYAMS

SEQ ID NO: 287 - protein, 17 aa, Artificial Sequence
  Made in a lab
SIYSSGGYTAYADSVKG

SEQ ID NO: 288 - protein, 11 aa, Artificial Sequence
  Made in a lab
VPHVFRGELDY

SEQ ID NO: 289 - protein, 5 aa, Artificial Sequence
  Made in a lab
FYTMW

SEQ ID NO: 290 - protein, 17 aa, Artificial Sequence
  Made in a lab
SIYPSGGQTLYADSVKG

SEQ ID NO: 291 - protein, 13 aa, Artificial Sequence
  Made in a lab
PDSYGYLYYGMDV

SEQ ID NO: 292 - protein, 5 aa, Artificial Sequence
  Made in a lab
WYPME

SEQ ID NO: 293 - protein, 17 aa, Artificial Sequence
  Made in a lab
GIGPSGGQTTYADSVKG

SEQ ID NO: 294 - protein, 6 aa, Artificial Sequence
  Made in a lab
GSYSFI

SEQ ID NO: 295 - protein, 5 aa, Artificial Sequence
  Made in a lab
LYKMA

SEQ ID NO: 296 - protein, 17 aa, Artificial Sequence
  Made in a lab
VIGSSGGRTPYADSVKG

SEQ ID NO: 297 - protein, 16 aa, Artificial Sequence
  Made in a lab
APLSGWFGQAHDAFDI

SEQ ID NO: 298 - protein, 5 aa, Artificial Sequence
  Made in a lab
TYEMN

SEQ ID NO: 299 - protein, 17 aa, Artificial Sequence
  Made in a lab
GIVPSGGVTYYADSVKG

SEQ ID NO: 300 - protein, 13 aa, Artificial Sequence
  Made in a lab
GPYSYGHDYGMDV

SEQ ID NO: 301 - protein, 5 aa, Artificial Sequence
  Made in a lab
VYPMH

SEQ ID NO: 302 - protein, 17 aa, Artificial Sequence
  Made in a lab
SIYSSGGFTMYADSVKG

SEQ ID NO: 303 - protein, 9 aa, Artificial Sequence
  Made in a lab
EGVADAFDI

SEQ ID NO: 304 - protein, 5 aa, Artificial Sequence
  Made in a lab
SYTMH

SEQ ID NO: 305 - protein, 17 aa, Artificial Sequence
  Made in a lab
SISPSGGMTFYADSVKG

SEQ ID NO: 306 - protein, 11 aa, Artificial Sequence
  Made in a lab
TYDFWSGYFDY

SEQ ID NO: 307 - protein, 5 aa, Artificial Sequence
  Made in a lab
TYEMG

SEQ ID NO: 308 - protein, 17 aa, Artificial Sequence
  Made in a lab
VIWSSGGHTWYADSVKG

SEQ ID NO: 309 - protein, 16 aa, Artificial Sequence
  Made in a lab
SNQGDFWSGYPFAFDI

SEQ ID NO: 310 - protein, 5 aa, Artificial Sequence
  Made in a lab
NYNMY

SEQ ID NO: 311 - protein, 17 aa, Artificial Sequence
  Made in a lab
YISPSGGMTKYADSVKG

SEQ ID NO: 312 - protein, 11 aa, Artificial Sequence
  Made in a lab
RGVLGYYGMDV

SEQ ID NO: 313 - protein, 5 aa, Artificial Sequence
  Made in a lab
LYSMN

SEQ ID NO: 314 - protein, 17 aa, Artificial Sequence
  Made in a lab
SISSSGGATLYADSVKG

SEQ ID NO: 315 - protein, 14 aa, Artificial Sequence
  Made in a lab
DLISSGYYPDAFDI

SEQ ID NO: 316 - protein, 5 aa, Artificial Sequence
  Made in a lab
QYMMH

SEQ ID NO: 317 - protein, 17 aa, Artificial Sequence
  Made in a lab
SISSSGGWTSYADSVKG

SEQ ID NO: 318 - protein, 19 aa, Artificial Sequence
  Made in a lab
PLALGYDFWSGYQAAGFDY

SEQ ID NO: 319 - protein, 5 aa, Artificial Sequence
  Made in a lab
WYSMV

SEQ ID NO: 320 - protein, 17 aa, Artificial Sequence
  Made in a lab
SIVPSGGLTWYADSVKG

SEQ ID NO: 321 - protein, 10 aa, Artificial Sequence
  Made in a lab
DVYGDYYFDN

SEQ ID NO: 322 - protein, 5 aa, Artificial Sequence
  Made in a lab
YYNMT

SEQ ID NO: 323 - protein, 17 aa, Artificial Sequence
  Made in a lab
SISPSGGRTGYADSVKG

SEQ ID NO: 324 - protein, 10 aa, Artificial Sequence
  Made in a lab
VSGFYAAFDY

SEQ ID NO: 325 - protein, 5 aa, Artificial Sequence
  Made in a lab
WYWMT

SEQ ID NO: 326 - protein, 17 aa, Artificial Sequence
  Made in a lab
SISPSGGHTSYADSVKG

SEQ ID NO: 327 - protein, 11 aa, Artificial Sequence
  Made in a lab
SSGWYEDYFDY

SEQ ID NO: 328 - protein, 5 aa, Artificial Sequence
  Made in a lab
PYEMA

SEQ ID NO: 329 - protein, 17 aa, Artificial Sequence
  Made in a lab
VIGPSGGYTEYADSVKG

SEQ ID NO: 330 - protein, 14 aa, Artificial Sequence
  Made in a lab
GYDFWSGYYDAFDI

SEQ ID NO: 331 - protein, 5 aa, Artificial Sequence
  Made in a lab
SYFMG

SEQ ID NO: 332 - protein, 17 aa, Artificial Sequence
  Made in a lab
SIWPSGGNTTYADSVKG

SEQ ID NO: 333 - protein, 10 aa, Artificial Sequence
  Made in a lab
HVGWGRYFDY

SEQ ID NO: 334 - protein, 5 aa, Artificial Sequence
  Made in a lab
AYRMI

SEQ ID NO: 335 - protein, 17 aa, Artificial Sequence
  Made in a lab
YISSSGGRTDYADSVKG

SEQ ID NO: 336 - protein, 15 aa, Artificial Sequence
  Made in a lab
GGLRYFDWLAPSMDY

SEQ ID NO: 337 - protein, 5 aa, Artificial Sequence
  Made in a lab
AYSMV

SEQ ID NO: 338 - protein, 17 aa, Artificial Sequence
  Made in a lab
YIYPSGGITTYADSVKG

SEQ ID NO: 339 - protein, 7 aa, Artificial Sequence
  Made in a lab
EGQVFDI

SEQ ID NO: 340 - protein, 5 aa, Artificial Sequence
  Made in a lab
NYAMG

SEQ ID NO: 341 - protein, 17 aa, Artificial Sequence
  Made in a lab
RIVPSGGMTSYADSVKG

SEQ ID NO: 342 - protein, 9 aa, Artificial Sequence
  Made in a lab
DDFWSGMDV

SEQ ID NO: 343 - protein, 5 aa, Artificial Sequence
  Made in a lab
LYNMQ

SEQ ID NO: 344 - protein, 17 aa, Artificial Sequence
  Made in a lab
GISLSGGKTFYADSVKG

SEQ ID NO: 345 - protein, 12 aa, Artificial Sequence
  Made in a lab
DYGVATLDAFDI

SEQ ID NO: 346 - protein, 5 aa, Artificial Sequence
  Made in a lab
AYTMH

SEQ ID NO: 347 - protein, 17 aa, Artificial Sequence
  Made in a lab
SIYPSGGTTPYADSVKG

SEQ ID NO: 348 - protein, 18 aa, Artificial Sequence
  Made in a lab
VVNIDFWSGYNMRSAFDI

SEQ ID NO: 349 - protein, 5 aa, Artificial Sequence
  Made in a lab
DYLMG

SEQ ID NO: 350 - protein, 17 aa, Artificial Sequence
  Made in a lab
VISSSGGPTAYADSVKG

SEQ ID NO: 351 - protein, 13 aa, Artificial Sequence
  Made in a lab
VGLDYGILGAFDI

SEQ ID NO: 352 - protein, 5 aa, Artificial Sequence
  Made in a lab
EYGMS

SEQ ID NO: 353 - protein, 17 aa, Artificial Sequence
  Made in a lab
SIRSSGGWTKYADSVKG

SEQ ID NO: 354 - protein, 11 aa, Artificial Sequence
  Made in a lab
GLGATSGEFDY

SEQ ID NO: 355 - protein, 5 aa, Artificial Sequence
  Made in a lab
KYDMW

SEQ ID NO: 356 - protein, 17 aa, Artificial Sequence
  Made in a lab
SIWPSGGWTSYADSVKG

SEQ ID NO: 357 - protein, 12 aa, Artificial Sequence
  Made in a lab
SRGSPWYGDFDH

SEQ ID NO: 358 - protein, 5 aa, Artificial Sequence
  Made in a lab
MYTMH

SEQ ID NO: 359 - protein, 17 aa, Artificial Sequence
  Made in a lab
WISPSGGWTKYADSVKG

SEQ ID NO: 360 - protein, 9 aa, Artificial Sequence
  Made in a lab
SPWGGPFDY

SEQ ID NO: 361 - protein, 5 aa, Artificial Sequence
  Made in a lab
QYFMM

SEQ ID NO: 362 - protein, 17 aa, Artificial Sequence
  Made in a lab
SISPSGGYTQYADSVKG

SEQ ID NO: 363 - protein, 14 aa, Artificial Sequence
  Made in a lab
TGDYTRYYSYGMDV

SEQ ID NO: 364 - protein, 5 aa, Artificial Sequence
  Made in a lab
GYSMA

SEQ ID NO: 365 - protein, 17 aa, Artificial Sequence
  Made in a lab
GIYSSGGWTWYADSVKG

SEQ ID NO: 366 - protein, 15 aa, Artificial Sequence
  Made in a lab
DQSFSYDSSLDAFDI

SEQ ID NO: 367 - protein, 5 aa, Artificial Sequence
  Made in a lab
LYGMH

SEQ ID NO: 368 - protein, 17 aa, Artificial Sequence
  Made in a lab
SIVPSGGLTRYADSVKG

SEQ ID NO: 369 - protein, 15 aa, Artificial Sequence
  Made in a lab
LAYYDFWSGRDAFDI

SEQ ID NO: 370 - protein, 5 aa, Artificial Sequence
  Made in a lab
HYGMD

SEQ ID NO: 371 - protein, 17 aa, Artificial Sequence
  Made in a lab
SIYSSGGYTLYADSVKG

SEQ ID NO: 372 - protein, 9 aa, Artificial Sequence
  Made in a lab
RTWADAFDV

SEQ ID NO: 373 - protein, 105 aa, Artificial Sequence
  Made in a lab
QSELTQPPSVSVSPGQTATITCSGEKLGDIYASWYQQKPGQSPVLVIYQDTKRPSGIPVRFSGSNSGNTATLTISGTQAMDEADYYCQAWDSSTVFGGGTKLTVL

SEQ ID NO: 374 - protein, 110 aa, Artificial Sequence
  Made in a lab
QSALTQPASVSGSPGQSITISCSGTDSDVGGYNHVSWYQQHPGKAPKLIIYDVDHRPSGISNRFSGSKSGNTASLTISGLQAEDEADYYCSSYRSGSTYVFGTATKVTVL

SEQ ID NO: 375 - protein, 108 aa, Artificial Sequence
  Made in a lab
QDIQMTQSPLSLSASVGDRVTITCRASQSISSYLNWYQQKPGEAPKLLIYAASALQSGVPSRFSGSGLGTVFTLTITSLQPEDSATYYCQQSYSPPVTFGGGTKVDIK

SEQ ID NO: 376 - protein, 107 aa, Artificial Sequence
  Made in a lab
QDIQMTQSPSTLSASVGDRVTITCRASQSISSWLAWYQQKPGKAPKLLIYKASSLESGVPSRFSGSGSGTEFTLTISSLQPDDFATYYCQQYNSYWTFGQGTKVEIK

SEQ ID NO: 377 - protein, 109 aa, Artificial Sequence
  Made in a lab
QDIQMTQSPATLSLSPGERATLSCRASQSVSSYLAWYQQKPGQAPRLLIYDASNRATGIPARFSGSGSGTDFTLTISSLEPEDSAVYYCQQRSNWPPFTFGGGTKVEIK

SEQ ID NO: 378 - protein, 108 aa, Artificial Sequence
  Made in a lab
QDIQMTQSPSSLSASVGDRVTITCQTSQSIDRYLNWYQQKAGEAPKLLIYAASSLQSGVPSRFSGSGSGTDFTLTISSLQPEDFASYYCQQSYRTPRTFGQGTKVEIK

SEQ ID NO: 379 - protein, 110 aa, Artificial Sequence
  Made in a lab
QDIQMTQSPGTLSLSPGERATLSCRASQSVSSSYLAWYQQKPGQAPRLLIYGASSRATGIPDRFSGSGSGTDFTLTISRLEPEDFAVYYCQQYGSSPLWTFGQGTKVEIK

SEQ ID NO: 380 - protein, 108 aa, Artificial Sequence
  Made in a lab
QDIQMTQSPSSLSASVGDRVTITCRASQSISSYLNWYQQKPGKAPKLLIYAASSLQSGVPSRFSGSGSGTDFTLTISSLQPEDFATYYCQQSYSTPRTFGQGTKVEIK

SEQ ID NO: 381 - protein, 110 aa, Artificial Sequence
  Made in a lab
QDIQMTQSPATLSLSPGERATLSCRASQSISTSLAWYQQIPGQAPRLLMYDASKRASGIPARFSGSGSGTDFTLTISSLEPEDSAVYYCQLRINWPPEFTFGPGTKVEIK

SEQ ID NO: 382 - protein, 108 aa, Artificial Sequence
  Made in a lab
QDIQMTQSPSSVSASVGDRVTITCRASRGVITWLNWYQQKPGRVPSPLIFGASTLQTGVPSRFSGSGSGTDFTLTINDLQPEDFATYYCQQTHSFPLTFGGGTKVEIK

SEQ ID NO: 383 - protein, 106 aa, Artificial Sequence
  Made in a lab
QSALTQPPSVSVSPGQTARITCSGDKLGEKYVSWYQQRSGQSPLLVISQDTKRPSGIPERFSGSNSGNTATLTISGAQAADEADYYCQTWDSDTYVFGSGSTVTVL

SEQ ID NO: 384 - protein, 108 aa, Artificial Sequence
  Made in a lab
QDIQMTQSPSSLSASVGDRVTITCRASQSISSYLNWYQQKPGKAPKLLIYAASSLQSGVPSRFSGSGSGTDFTLTISSLQPEDFATYYCQQSYSTLWTFGQGTKVEIK

SEQ ID NO: 385 - protein, 108 aa, Artificial Sequence
  Made in a lab
QDIQMTQSPATLSLSPGERATLSCRASQSVRSYLAWYQQKPGQAPRLLIYDASNRATGIPARFSGSGSGTDFTLTITSLQPEDIATYYCQQYDNLPLTFGGGTKVEIK

SEQ ID NO: 386 - protein, 108 aa, Artificial Sequence
  Made in a lab
QDIQMTQSPSSLSAFVGDRVTITCRTSQSVATYVNWYQQKPGEGPKLLIYAASSLQSGVPSRFRGSGSGTDFTLTIGSLQPEDFATYYCQQSYSVPITFGQGTRLDIK

SEQ ID NO: 387 - protein, 109 aa, Artificial Sequence
  Made in a lab
QDIQMTQSPSTLSASVGDRVTITCRASQSMSNWLAWYQQKPGKAPKLLIYDVFTLKSGVPSRFSGSRSGTEFTLTISSLQPDDFATYYCQQYSDYSGITFGPGTEVDIR

SEQ ID NO: 388 - protein, 111 aa, Artificial Sequence
  Made in a lab
QSVLTQPPSASGTPGQRVTISCSGSSSNIGSKVVYWYQQVPGTAPKLLIYRNDQRPSGVPDRFSGSKSGTSASLAISGLRSEDEADYYCAAWDDSLSGRWVFGGGTKLTVL

SEQ ID NO: 389 - protein, 108 aa, Artificial Sequence
  Made in a lab
QDIQMTQSPATLSASVGDRVTITCRASQSISSWLAWYQQKPGKAPKLLIYKASGLESGVPSRFSGSGSGTEFTLTISSLQPDDFATYYCQQYNSYPFTFGPGTKVDIK

SEQ ID NO: 390 - protein, 108 aa, Artificial Sequence
  Made in a lab
QDIQMTQSPLSLSASVGDRVTITCQASRDISIYLNWYQQKPGKVPKLLIFGASTLRSGVPSRFSGSGSGTDFTLTITSLQPEDVATYYCQKYNSAPYTFGPGTKVEIR

SEQ ID NO: 391 - protein, 108 aa, Artificial Sequence
  Made in a lab
QDIQMTQSPSSVSASVGDRVTITCRASQGISSWLAWYQQKPGKAPKLLIYAASSLQSGVPSRFSGSGSGTDFTLTISSLQPEDFATYYCQQANSFPLTFGGGTKVEIK

SEQ ID NO: 392 - protein, 108 aa, Artificial Sequence
  Made in a lab
QDIQMTQSPATLSLSPGERATLSCRASQSINTYLAWYQQKPGHPPRLLIYDASNRATGIPDRFSGSGSGTDFTLTISRLEPEDFVVYYCQQYGRSRYTFGQGTKLEIK

SEQ ID NO: 393 - protein, 108 aa, Artificial Sequence
  Made in a lab
QDIQMTQSPSSLSASVGDRVTITCRASQGISNYLAWYQQKPGKVPKLLIYAASTLQSGVPSRFSGSGSGTEFTLTISSLQPEDFATYYCQQSDNIPYTFGLGTKLEIK

SEQ ID NO: 394 - protein, 110 aa, Artificial Sequence
  Made in a lab
QSELTQPPSASGTPGQRVTISCSGSSSNIGSNTVNWYQQLPGTAPKLLIYSNNQRPSGVPDRFSGSKSGTSASLAISGLQSEDEADYYCAAWDDSLNGYVFGIGTKVTVL

SEQ ID NO: 395 - protein, 108 aa, Artificial Sequence
  Made in a lab
QDIQMTQSPSSLSASVGDSVTIACRASQSISTYLNWYQQKPGQAPKLLIYEATNLQSGVPSRFSGSGSGTDFTLTISSLQPEDVATYYCQQANNFPFTFGPGTKVDIK

SEQ ID NO: 396 - protein, 110 aa, Artificial Sequence
  Made in a lab
QSVLTQPPSASGTPGQRVTISCSGSSSNIGGNAVNWYQQLPGTAPKLVLYSSNHRPSGVPDRFSGSRSGTSASLAISGLQSQDEADYYCAAWDDSLNGPLFGGGTKLTVL

SEQ ID NO: 397 - protein, 108 aa, Artificial Sequence
  Made in a lab
QSELTQPPSVSVSPGQTATISCSGEKLGDRYAWWYQQKAGQSPVLVIYQDTKRPSGVPDRFSGSNSGTSASLVISGLQSEDEADYYCAAWDDSLKGVVFGGGSKLTVL

SEQ ID NO: 398 - protein, 110 aa, Artificial Sequence
  Made in a lab
QSELTQPPSASGTPGQRVTISCSGRSSNIGSNSVNWYQQLPGTAPKLLIYSNNHRPSGVPDRFSGSKSGTSASLAISGLQSEDEADYYCAAWDDSLYQGVFGGGTKLTVL

SEQ ID NO: 399 - protein, 108 aa, Artificial Sequence
  Made in a lab
QDIQMTQSPSSLSASVGDRVTITCRASQSISSYLNWYQQKPGKAPKLLIYAASSLQSGVPSKFSGSGSGTDFTLTISSLLPEDFATYYCQQYEYFPPTFGQGTKVEIK

SEQ ID NO: 400 - protein, 109 aa, Artificial Sequence
  Made in a lab
QDIQMTQSPDSLSLSPGERATLSCRASQSVSSSYLAWYQQKPGQAPRLLIYGASSRATGIPDRFSGSGSGTDFTLTISRLEPEDFAVYYCQQYGSSSLTFGGGTEVEIK

SEQ ID NO: 401 - protein, 108 aa, Artificial Sequence
  Made in a lab
QDIQMTQSPATLSASVGDRVTITCRSSQRISGYLNWYQQQPGKAPKLLIYAASTLQSGVPSRISGSGSGTDFSLIISSLQPEDVATYYCQQSYSPPFTFGQGTKVEIK

SEQ ID NO: 402 - protein, 108 aa, Artificial Sequence
  Made in a lab
QDIQMTQSPSTLSASVGDRVTITCRASQSISTWLAWFQQKPGKAPKLLIYKASSLQSGVPSRFSGSGSGTDFTLTISSLQPEDFATYYCQQYKSYPFTFGGGTKVEIK

SEQ ID NO: 403 - protein, 108 aa, Artificial Sequence
  Made in a lab
QDIQMTQSPSSLSASVGDSVTITCQASQDIRSYLNWFQQKPGKAPKLLIYDTVNLQTGVPSRFSGSGSGTDYSFTINNLQPEDFATYYCQQYEYLPITFGQGTRLEIK

SEQ ID NO: 404 - protein, 108 aa, Artificial Sequence
  Made in a lab
QDIQMTQSPSSLSASVGDRVTITCRASQSISNYLNWYQQKSGKAPNLLMYAASSLHSGVSSRFSGSGSGTEFTLTISSLQPEDYATYYCQQSYSTSGTFGQGTKVEIK

SEQ ID NO: 405 - protein, 108 aa, Artificial Sequence
  Made in a lab
QDIQMTQSPSSLSASVGDRVTITCRASQSISSYLNWYQQKPGKAPKLLIYAASSLQSGVPSRFSGSGSGTDFTLTISSLQPEDFATYYCQQSYSTPVTFGGGTKVEIK

SEQ ID NO: 406 - protein, 109 aa, Artificial Sequence
  Made in a lab
QDIQMTQSPSSLSASVGDRVAITCRASQSIDTYLNWYQHKPGKAPKLLIYAASSLQSGVPSRFSGSGSGTDFTLTISGLQPEDFASYFCQQSYSSPGITFGGGTRVEIK

SEQ ID NO: 407 - protein, 108 aa, Artificial Sequence
  Made in a lab
QDIQMTQSPSSLSASVGDRVTITCRASQSIGTYLNWYQQKPGKAPNLLIYGTSSLQRGVPSRFSGSGSGTDFTLTISTLQPEDFVHYYCQQSYTSPPTFGQGTKVEVK

SEQ ID NO: 408 - protein, 106 aa, Artificial Sequence
  Made in a lab
QYELTQSPSVSVSPGQTASIPCSGDQLGGKFTSWYQQKAGQSPLLVIYQDTKRPSGIPERFSGSNSGNTATLTITGTQAMDEADYYCLVWDSNTYVFGPGTKVTVL

SEQ ID NO: 409 - protein, 108 aa, Artificial Sequence
  Made in a lab
QYELTQPPSVSVAPGQTARITCGGNNIGSKSVHWYQQKPGQAPVLVVYDDSDRPSGIPERFSGSNSGNTATLTVSRVEAGDEADYYCQVWDSSGGLQVFGTGTKVTVL

SEQ ID NO: 410 - protein, 108 aa, Artificial Sequence
  Made in a lab
QDIQMTQSPSTLSASVGDRVTITCRASQSISSWLAWYQQKPGKAPKLLIYKASNLESEVPSRFSGSGSGTEFTLTISSLQPDDFATYYCQQYNAYPFIFGPGTKVDIK

SEQ ID NO: 411 - protein, 107 aa, Artificial Sequence
  Made in a lab
QDIQMTQSPSTLSASVGDRVTITCRASQSISSWLAWYQQKPGKAPKLLIYKASSLESGVPSRFSGSGSGTEFTLTISSLQPDDFATYHCQQYKSYWTFGQGTKVEIK

SEQ ID NO: 412 - protein, 110 aa, Artificial Sequence
  Made in a lab
QSELTQPPSVSEAPRQRVTVSCSGSPSNIGSNSVNWYQQLPGKAPKVVIYYDDLVPSGVSDRFSGSKSGTSASLAISGLQSEDEADYYCAAWDDRLNGWVFGGGTKLTVL

SEQ ID NO: 413 - protein, 108 aa, Artificial Sequence; identical to SEQ ID NO: 391
  Made in a lab

SEQ ID NO: 414 - protein, 108 aa, Artificial Sequence
  Made in a lab
QDIQMTQSPSSLSASVGDRVTITCRASQSISSYLNWYQQKPGKAPKLLIYAASSLQSGVPSRFSGSGSGTDFTLTISSLQPEDFATYYCQQSYSTPYTFGQGTKLEIK

SEQ ID NO: 415 - protein, 108 aa, Artificial Sequence
  Made in a lab
QDIQMTQSPGTLSLSPGERATLSCRASQSVSSSYLAWYQQKPGQAPRLLIYGASNRVTGIPDRFSGSGSGTDFTLTISRLEPEDSAVYYCHQYGSQYTFGPGTKLEIK

SEQ ID NO: 416 - protein, 108 aa, Artificial Sequence
  Made in a lab
QDIQMTQSPSSLSASVGDRVTISCQASQHISNFLNWYQQKPGKAPKLLIYDTSNLRSGVPSRFSGSGSGTDFTFTISSLQPEDIATYYCQQYDNFPLTFGGGTKVEIK

SEQ ID NO: 417 - protein, 110 aa, Artificial Sequence
  Made in a lab
QSELTQPPSVSEAPGQRVTISCSGSTSNIGNNAVIWYQQLPGKAPKLLIYYDDLLPSGVSDRFSGSKSGTSGSLAISGLQSEDEADYYCASWDDNLNGPLFGGGTKLTVL

SEQ ID NO: 418 - protein, 108 aa, Artificial Sequence
  Made in a lab
QDIQMTQSPSTLSASVGDRVTITCRASQSISSWLAWYQQKPGKAPKLLIYQASTLESGVPSRFSGSGSGTDFTLTISSLQPEDFATYYCQQANSFPITFGGGTKVEIN

SEQ ID NO: 419 - protein, 108 aa, Artificial Sequence
  Made in a lab
QDIQMTQSPSSLSASVGDRVTITCQASQDITNYLNWYLHKPGKAPKLLIYDASNLQTGVPSRFSGSGSGTDFTFTITSLQPEDFGTYYCQQYDTLHPSFGPGTTVDIK

SEQ ID NO: 420 - protein, 110 aa, Artificial Sequence
  Made in a lab
QSALTQPPSASGSPGQSVTISCTGTSSDVGVYDSVSWYQQHPGKAPKLMIYDVSDRPSGVSNRFSGSKSGYTASLTISALQAEDEADYYCGSYRASSSYVFGTGTKVTVL

SEQ ID NO: 421 - protein, 108 aa, Artificial Sequence
  Made in a lab
QDIQMTQSPSSLSASVGDRVTITCRASQNIYHYLHWYQQKPGKAPKLLIYAASTLESGVPSRFSGSGSGTDFTLTINSLQPEDFATYYCQQTYDTPLTFGGGSKVEVK

SEQ ID NO: 422 - protein, 107 aa, Artificial Sequence
  Made in a lab
QSALTQPPSVSVSPGQTASITCSGDKLGEKFASWYQQRPGQSPILVIYQDSKRPSGIPERFSGSNSGNTATLTISGTQTMDEADYYCQAWGGSTAYVFGSGTKVTVL

SEQ ID NO: 423 - protein, 110 aa, Artificial Sequence
  Made in a lab
QDIQMTQSPATLSLSPGERATLSCRASQSVTTYLAWYQQRPGQAPRLLIYDASNRATGIPARFSGSGSGTDFTLTISSVEPEDYAVYYCQQRSNWPPSITFGQGTRLESK

SEQ ID NO: 424 - protein, 110 aa, Artificial Sequence
  Made in a lab
QSALTQPASVSGSPGQSITISCTGTSSDVGSYNLVSWYQQHPGKAPKVMIYEGSKRPSGVSNRFSGSKSGNTASLTISGLQAEDEADYYCCSYAGRSTYVFGTGTKVTVL

SEQ ID NO: 425 - protein, 107 aa, Artificial Sequence
  Made in a lab
QSELTQTPSVSVSPGQTASITCSGNRLEDKYVHWYQQKPGQSPVLVLYQDNKRPSGIPERFSGSNSGNTATLTISETQTLDEADYYCQAWDSSTREVFGGGTKLTVL

SEQ ID NO: 426 - protein, 108 aa, Artificial Sequence
  Made in a lab
QDIQMTQSPSSVSASVGDTVTITCRASQGVSDWLAWYQQKPGKAPNLLIYGASSLQTGVPSRFSGGGSGTDFTLTISSLQPEDFATYYCQQAHSFPFTFGGGTRVEIK

SEQ ID NO: 427 - protein, 109 aa, Artificial Sequence
  Made in a lab
QDIQMTQSPATLSVSPGERATLSCRASQNINTHLAWYQQKPGQAPRLLIFGASTRATGIPARFSGSGSGTEFTLTISSLQSEDFTVYYCQQYGSSLTWTFGQGTKVEIK

SEQ ID NO: 428 - protein, 109 aa, Artificial Sequence
  Made in a lab
QDIQMTQSPGTLSLSPGERATLSCRASQSVSGNYLAWYQQKLGQAPRLLIYGASSRATGTPDRFSGSGSGTEFTLTISSLQPEDFATYYCLQHNSYPLTSGSGTEFTLT

SEQ ID NO: 429 - protein, 108 aa, Artificial Sequence
  Made in a lab
QSELTQPPSVSVAPGETATVTCGGINIGSKSVHWYQQKPGQAPVVVMYFDSDRPSGIPERFSGSNSGDTATLTISRVEAGDEADYYCQVWDSRSDQYVFGFGTKVTVL

SEQ ID NO: 430 - protein, 108 aa, Artificial Sequence
  Made in a lab
QDIQMTQSPSTLSASVGDRVTITCRASQSISSWLAWYQQKPGKAPKLLIYKASTLESGVPSRFSAGGSGTEFTLTISSLQPDDFGTYYCQQYNSYSLTFGGGTKVEII

SEQ ID NO: 431 - protein, 108 aa, Artificial Sequence
  Made in a lab
QDIQMTQSPSSLSASVGDRVTITCRASQSISSYLNWYQQKPGKAPKLLIYAASSLQSGVPSRFSGSGSGTDFTLTISSLQPEDFATYYCQQSYSTPLTFGGGTKVEIK

SEQ ID NO: 432 - protein, 108 aa, Artificial Sequence
  Made in a lab
QDIQMTQSPSSLSASVGDRVTITCRASQSINNYLNWYQQKPGKAPKLLIYTASTLHSGVPSRFSGSGSGTDFTLTISNLQPEDFATYYCQQSYATLRTFGQGTKVEIK

SEQ ID NO: 433 - protein, 110 aa, Artificial Sequence
  Made in a lab
QSVLTQPASVSGSPGQSITISCSGSSSDVGHYDYVSWYQQHPGKAPKLMIYDVSNRPSGVSNRFSGSKSGNTASLTISGLQADDEAEYYCSSYTSSGTRVFGTGTKVTVL

SEQ ID NO: 434 - protein, 108 aa, Artificial Sequence
  Made in a lab
QDIQMTQSPSTLSASVGDRVTFTCRASQSVNNWVAWYQQKPGKAPKLLIYAASSLQSGVPSRFSGSGSGTDFTLTISSLQPEDFATYYCQQSYSMPLTFGGGTKVEIK

SEQ ID NO: 435 - protein, 118 aa, Artificial Sequence
  Made in a lab
EVQLLESGGGLVQPGGSLRLSCAASGFTFSKYSMHWVRQAPGKGLEWVSSIWPSGGWTTYADSVKGRFTISRDNSKNTLYLQMNSLRAEDTAVYYCARGGYYYALDYWGQGNLVTVSS

SEQ ID NO: 436 - protein, 122 aa, Artificial Sequence
  Made in a lab
EVQLLESGGGLVQPGGSLRLSCAASGFTFSFYQMHWVRQAPGKGLEWVSGIYPSGGYTKYADSVKGRFTISRDNSKNTLYLQMNSLRAEDTAVYYCARDLGYGSSWYYFDYWGQGTLVTVSS

SEQ ID NO: 437 - protein, 117 aa, Artificial Sequence
  Made in a lab
EVQLLESGGGLVQPGGSLRLSCAASGFTFSKYSMHWVRQAPGKGLEWVSGISPSGYTRYADSVKGRFTISRDNSKNTLYLQMNSLRAEDTAVYYCARDQLLEAFDIWGQGTTVTVSS

SEQ ID NO: 438 - protein, 119 aa, Artificial Sequence
  Made in a lab
EVQLLESGGGLVQPGGSLRLSCAASGFTFSEYPMNWVRQAPGKGLEWVSGIYSSGGLTKYADSVKGRFTISRDNSKNTLYLQMNSLRAEDTAVYYCARDHYGDYAFDYWGQGTLVTVSS

SEQ ID NO: 439 - protein, 126 aa, Artificial Sequence
  Made in a lab
EVQLLESGGGLVQPGGSLRLSCAASGFTFSLYEMVWVRQAPGKGLEWVSGIWPSGGWTQYADSVKGRFTISRDNSKNTLYLQMNSLRAEDTAVYYCARDLAVAGWDYYYYYGMDVWGQGTTVTVSS

SEQ ID NO: 440 - protein, 125 aa, Artificial Sequence
  Made in a lab
EVQLLESGGGLVQPGGSLRLSCAASGFTFSQYNMIWVRQAPGKGLEWVSWISSSGGTEYADSVKGRFTISRDNSKNTLYLQMNSLRAEDTAVYYCAKDRGYGSGSYGAYDAFDIWGQGKMVTVSS

SEQ ID NO: 441 - protein, 118 aa, Artificial Sequence
  Made in a lab
EVQLLESGGGLVQPGGSLRLSCAASGFTFSHYSMGWVRQAPGKGLEWVSSIYPSGGSTLYADSVKGRFTISRDNSKNTLYLQMNSLRAEDTAVYYCARWGVGATFDYWGQGTLVTVSS

SEQ ID NO: 442 - protein, 118 aa, Artificial Sequence
  Made in a lab
EVQLLESGGGLVQPGGSLRLSCAASGFTFSHYMMAWVRQAPGKGLEWVSYIYPSGGWTSYADSVKGRFTISRDNSKNTLYLQMNSLRAEDTAVYYCARFDYTIGFDFWGQGTLVTVSS

SEQ ID NO: 443 - protein, 120 aa, Artificial Sequence
  Made in a lab
EVQLLESGGGLVQPGGSLRLSCAASGFTFSHYGMTWVRQAPGKGLEWVSGIRSSGGVTNYADSVKGRFTISRDNSKNTLYLQMNSLRAEDTAVYYCAREGSGWSKAFDIWGQGTMVTVSS

SEQ ID NO: 444 - protein, 127 aa, Artificial Sequence
  Made in a lab
EVQLLESGGGLVQPGGSLRLSCAASGFTFSHYNMRWVRQAPGKGLEWVSSISPSGGFTGYADSVKGRFTISRDNSKNTLYLQMNSLRAEDTAVYYCARGINYYDSSGYYPPVGMDVWGQGTTVTVSS

SEQ ID NO: 445 - protein, 123 aa, Artificial Sequence
  Made in a lab
EVQLLESGGGLVQPGGSLRLSCAASGFTFSWYNMLWVRQAPGKGLEWVSSISPSGGYTVYADSVKGRFTISRDNSKNTLYLQMNSLRAEDTAVYYCARDRGGSPFRPDAFDIWGQGTMVTVSS

SEQ ID NO: 446 - protein, 125 aa, Artificial Sequence
  Made in a lab
EVQLLESGGGLVQPGGSLRLSCAASGFTFSEYDMLWVRQAPGKGLEWVSSIWPSGGFTQYADSVKGRFTISRDNSKNTLYLQMNSLRAEDTAVYYCARNYYDFWSGPYYYGMDVWGQGTTVTVSS

SEQ ID NO: 447 - protein, 122 aa, Artificial Sequence
  Made in a lab
EVQLLESGGGLVQPGGSLRLSCAASGFTFSGYVMGWVRQAPGKGLEWVSSISPSGGYTLYADSVKGRFTISRDNSKNTLYLQMNSLRAEDTAVYYCARAFSTRWYWGAFDIWGQGTMVTVSS

SEQ ID NO: 448 - protein, 125 aa, Artificial Sequence
  Made in a lab
EVQLLESGGGLVQPGGSLRLSCAASGFTFSIYHMNWVRQAPGKGLEWVSGISSSGGRTNYADSVKGRFTISRDNSKNTLYLQMNSLRAEDTAVYYCASSYRAAGWVDYYYGMDVWGQGTTVTVSS

SEQ ID NO: 449 - protein, 121 aa, Artificial Sequence
  Made in a lab
EVQLLESGGGLVQPGGSLRLSCAASGFTFSLYDMHWVRQAPGKGLEWVSRIYSSGGTTQYADSVKGRFTISRDNSKNTLYLQMNSLRAEDTAMYYCARDPGYGSHHSFDYWGQGTLVTVSS

SEQ ID NO: 450 - protein, 117 aa, Artificial Sequence
  Made in a lab
EVQLLESGGGLVQPGGSLRLSCAASGFTFSSYYMTWVRQAPGKGLEWVSGIYSSGGPTQYADSVKGRFTISRDNSKNTLYLQMNSLRAEDTAVYYCARAGGDAFDIWGQGTMVTVSS

SEQ ID NO: 451 - protein, 118 aa, Artificial Sequence
  Made in a lab
EVQLLESGGGLVQPGGSLRLSCAASGFTFSSYEMFWVRQAPGKGLEWVSSISPSGGYTYYADSVKGRFTISRDNSKNTLYLQMNSLRAEDTAVYYCATMTTSGFHLIWGQGTMVTVSS

SEQ ID NO: 452 - protein, 117 aa, Artificial Sequence
  Made in a lab
EVQLLESGGGLVQPGGSLRLSCAASGFTFSDYPMQWVRQAPGKGLEWVSWIGPSGGWTVYADSVKGRFTISRDNSKNTLYLQMNSLRAEDTAVYYCARDDGIAGFLWGQGTLVTVSS

SEQ ID NO: 453 - protein, 125 aa, Artificial Sequence
  Made in a lab
EVQLLESGGGLVQPGGSLRLSCAASGFTFSWYLMHWVRQAPGKGLEWVSGIWPSGGHTLYADSVKGRFTISRDNSKNTLYLQMNSLRAEDTAVYYCAREPLLWFGELSYNWFDPWGQGTLVTVSS

SEQ ID NO: 454 - protein, 123 aa, Artificial Sequence
  Made in a lab
EVQLLESGGGLVQPGGSLRLSCAASGFTFSYYENMAWVRQAPGKGLEWVSGIYPSGGLTYYADSVKGRFTISRDNSKNTLYLQMNSLRAEDTAVYYCARSRRYYDSSDAFDIWGQGTMVTVSS

SEQ ID NO: 455 - protein, 123 aa, Artificial Sequence
  Made in a lab
EVQLLESGGGLVQPGGSLRLSCAASGFTFSTYVMYWVRQAPGKGLEWVSGIGPSGGNTFYADSVKGRFTISRDNSKNTLYLQMNSLRAEDTAVYYCARDPGDFWSGYYGMDVWGQGTTVTVSS

SEQ ID NO: 456 - protein, 122 aa, Artificial Sequence
  Made in a lab
EVQLLESGGGLVQPGGSLRLSCAASGFTFSFYGMAWVRQAPGKGLEWVSSIYPSGGYTDYADSVKGRFTISRDNSKNTLYLQMNSLRAEDTAVYYCARSAGGWIGGGAFDIWGQGTMVTVSS

SEQ ID NO: 457 - protein, 126 aa, Artificial Sequence
  Made in a lab
EVQLLESGGGLVQPGGSLRLSCAASGFTFSKYPMMWVRQAPGKGLEWVSYIYPSGGKTAYADSVKGRFTISRDNSKNTLYLQMNSLRAEDTAVYYCATYGSGSYYLYYYYYYMDVWGKGTTVTVSS

SEQ ID NO: 458 - protein, 125 aa, Artificial Sequence
  Made in a lab
EVQLLESGGGLVQPGGSLRLSCAASGFTFSWYSMWWVRQAPGKGLEWVSYIVPSGGETIYADSVKGRFTISRDNSKNTLYLQMNSLRAEDTAVYYCAKNLGEGFWSDYYPPLDYWGQGTLVTVSS

SEQ ID NO: 459 - protein, 118 aa, Artificial Sequence
  Made in a lab
EVQLLESGGGLVQPGGSLRLSCAASGFTFSHYGMHWVRQAPGKGLEWVSSIYPGMTQYADSVKGRFTISRDNSKNTLYLQMNSLRAEDTAVYYCARDRGSGIDAFDIWGQGTMVTVSS

SEQ ID NO: 460 - protein, 125 aa, Artificial Sequence
  Made in a lab
EVQLLESGGGLVQPGGSLRLSCAASGFTFSWYDMLWVRQAPGKGLEWVSVISPSGGRTFYADSVKGRFTISRDNSKNTLYLQMNSLRAEDTAVYYCAVTRSMYSSSWYGAPPTHWGQGTLVTVSS

SEQ ID NO: 461 - protein, 120 aa, Artificial Sequence
  Made in a lab
EVQLLESGGGLVQPGGSLRLSCAASGFTFSWYKMHWVRQAPGKGLEWVSGISSSGGLTKYADSVKGRFTISRDNSKNTLYLQMNSLRAEDTAVYYCTTERRGDGGAFDIWGQGTMVTVSS

SEQ ID NO: 462 - protein, 122 aa, Artificial Sequence
  Made in a lab
EVQLLESGGGLVQPGGSLRLSCAASGFTFSEYTMYWVRQAPGKGLEWVSYISPSGGTTNYADSVKGRFTISRDNSKNTLYLQMNSLRAEDTAVYYCAKGAWGDIYYYGMDVWGQGTTVTVSS

SEQ ID NO: 463 - protein, 115 aa, Artificial Sequence
  Made in a lab
EVQLLESGGGLVQPGGSLRLSCAASGFTFSSYWMHWVRQAPGKGLEWVSSIYPSGGSTEYADSVKGRFTISRDNSKNTLYLQMNSLRAEDTAVYYCAKGIWFDPWGQGTLVTVSS

SEQ ID NO: 464 - protein, 121 aa, Artificial Sequence
  Made in a lab
EVQLLESGGGLVQPGGSLRLSCAASGFTFSRYGMMWVRQAPGKGLEWVSYISSSGGFTRYADSVKGRFTISRDNSKNTLYLQMNSLRAEDTAVYYCARVGGYSYGPHFDFWGQGTLVTVSS

SEQ ID NO: 465 - protein, 123 aa, Artificial Sequence
  Made in a lab
EVQLLESGGGLVQPGGSLRLSCAASGFTFSWYHMIWVRQAPGKGLEWVSWISPSGGFTKYADSVKGRFTISRDNSKNTLYLQMNSLRAEDTAVYYCARYDSRAAAGTNAFDIWGQGTMVTVSS

SEQ ID NO: 466 - protein, 123 aa, Artificial Sequence
  Made in a lab
EVQLLESGGGLVQPGGSLRLSCAASGFTFSPYKMVWVRQAPGKGLEWVSGISPSGGYTYYADSVKGRFTISRDNSKNTLYLQMNSLRAEDTAVYYCARGGYGWSYYYYGMDVWGQGTTVTVSS

SEQ ID NO: 467 - protein, 118 aa, Artificial Sequence
  Made in a lab
EVQLLESGGGLVQPGGSLRLSCAASGFTFSNYWMYWVRQAPGKGLEWVSVISSSGGHTFYADSVKGRFTISRDNSKNTLYLQMNSLRAEDTAVYYCARDYEGGSNDYWGQGTLVTVSS

SEQ ID NO: 468 - protein, 120 aa, Artificial Sequence
  Made in a lab
EVQLLESGGGLVQPGGSLRLSCAASGFTFSNYAMSWVRQAPGKGLEWVSSIYSSGGYTAYADSVKGRFTISRDNSKNTLYLQMNSLRAEDTAMYYCARVPHVFRGELDYWGQGTLVTVSS

SEQ ID NO: 469 - protein, 122 aa, Artificial Sequence
  Made in a lab
EVQLLESGGGLVQPGGSLRLSCAASGFTFSFYTMWWVRQAPGKGLEWVSSIYPSGGQTLYADSVKGRFTISRDNSKNTLYLQMNSLRAEDTAVYYCARPDSYGYLYYGMDVWGQGTTVTVSS

SEQ ID NO: 470 - protein, 115 aa, Artificial Sequence
  Made in a lab
EVQLLESGGGLVQPGGSLRLSCAASGFTFSWYPMEWVRQAPGKGLEWVSGIGPSGGQTTYADSVKGRFTISRDNSKNTLYLQMNSLRAEDTAVYYCARGSYSFIWGQGTMVTVSS

SEQ ID NO: 471 - protein, 125 aa, Artificial Sequence
  Made in a lab
EVQLLESGGGLVQPGGSLRLSCAASGFTFSLYKMAWVRQAPGKGLEWVSVIGSSGGRTPYADSVKGRFTISRDNSKNTLYLQMNSLRAEDTAVYYCARAPLSGWFGQAHDAFDIWGQGTMVTVSS

SEQ ID NO: 472 - protein, 122 aa, Artificial Sequence
  Made in a lab
EVQLLESGGGLVQPGGSLRLSCAASGFTFSTYEMNWVRQAPGKGLEWVSGIVPSGGVTYYADSVKGRFTISRDNSKNTLYLQMNSLRAEDTAVYYCARGPYSYGHDYGMDVWGQGTTVTVSS

SEQ ID NO: 473 - protein, 112 aa, Artificial Sequence
  Made in a lab
EVQLLESGGGLVQPGGSLRLSCAASGFTFSVYPMHWVRQAPGKGLEWVSSIYSSGGFTMYADSVKGRFTISRDNSKNTLYLQMNSLRAEDTAEGVADAFDIWGQGTMVTVSS

SEQ ID NO: 474 - protein, 120 aa, Artificial Sequence
  Made in a lab
EVQLLESGGGLVQPGGSLRLSCAASGFTFSSYTMHWVRQAPGKGLEWVSSISPSGGMTFYADSVKGRFTISRDNSKNTLYLQMNSLRAEDTAVYYCARTYDFWSGYFDYWGQGTLVTVSS

SEQ ID NO: 475 - protein, 125 aa, Artificial Sequence
  Made in a lab
EVQLLESGGGLVQPGGSLRLSCAASGFTFSTYEMGWVRQAPGKGLEWVSVIWSSGGHTWYADSVKGRFTISRDNSKNTLYLQMNSLRAEDTAVYYCARSNQGDFWSGYPFAFDIWGQGTMVTVSS

SEQ ID NO: 476 - protein, 120 aa, Artificial Sequence
  Made in a lab
EVQLLESGGGLVQPGGSLRLSCAASGFTFSNYNMYWVRQAPGKGLEWVSYISPSGGMTKYADSVKGRFTISRDNSKNTLYLQMNSLRAEDTAVYYCARRGVLGYYGMDVWGQGTTVTVSS

SEQ ID NO: 477 - protein, 123 aa, Artificial Sequence
  Made in a lab
EVQLLESGGGLVQPGGSLRLSCAASGFTFSLYSMNWVRQAPGKGLEWVSSISSSGGATLYADSVKGRFTISRDNSKNTLYLQMNSLRAEDTAVYYCARDLISSGYYPDAFDIWGQGTMVTVSS

SEQ ID NO: 478 - protein, 128 aa, Artificial Sequence
  Made in a lab
EVQLLESGGGLVQPGGSLRLSCAASGFTFSQYMMHWVRQAPGKGLEWVSSISSSGGWTSYADSVKGSFTISRDNSKNTLYLQMNSLRAEDTAVYYCARPLALGYDFWSGYQAAGFDYWGQGTLVTVSS

SEQ ID NO: 479 - protein, 119 aa, Artificial Sequence
  Made in a lab
EVQLLESGGGLVQPGGSLRLSCAASGFTFSWYSMVWVRQAPGKGLEWVSSIVPSGGLTWYADSVKGRFTISRDNSKNTLYLQMNSLRAEDTAVYYCARDVYGDYYFDNWGQGTLVTVSS

SEQ ID NO: 480 - protein, 119 aa, Artificial Sequence
  Made in a lab
EVQLLESGGGLVQPGGSLRLSCAASGFTFSYYNMTWVRQAPGKGLEWVSSISPSGGRTGYADSVKGRFTISRDNSKNTLYLQMNSLRAEDTAVYYCARVSGFYAAFDYWGQGTLVTVSS

SEQ ID NO: 481 - protein, 120 aa, Artificial Sequence
  Made in a lab
EVQLLESGGGLVQPGGSLRLSCAASGFTFSWYWMTWVRQAPGKGLEWVSSISPSGGHTSYADSVKGRFTISRDNSKNTLYLQMNSLRAEDTAVYYCAKSSGWYEDYFDYWGQGTLVTVSS

SEQ ID NO: 482 - protein, 123 aa, Artificial Sequence
  Made in a lab
EVQLLESGGGLVQPGGSLRLSCAASGFTFSPYEMAWVRQAPGKGLEWVSVIGPSGGYTEYADSVKGRFTISRDNSKNTLYLQMNSLRAEDTAVYYCARGYDFWSGYYDAFDIWGQGTMVTVSS

SEQ ID NO: 483 - protein, 119 aa, Artificial Sequence
  Made in a lab
EVQLLESGGGLVQPGGSLRLSCAASGFTFSSYFMGWVRQAPGKGLEWVSSIWPSGGNTTYADSVKGRFTISRDNSKNTLYLQMNSLRAEDTAVYYCARHVGWGRYFDYWGQGTLVTVSS

SEQ ID NO: 484 - protein, 124 aa, Artificial Sequence
  Made in a lab
EVQLLESGGGLVQPGGSLRLSCAASGFTFSAYRMIWVRQAPGKGLEWVSYISSSGGRTDYADSVKGRFTISRDNSKNTLYLQMNSLRAEDTAVYYCTTGGLRYFDWLAPSMDYWGQGTLVTVSS

SEQ ID NO: 485 - protein, 116 aa, Artificial Sequence
  Made in a lab
EVQLLESGGGLVQPGGSLRLSCAASGFTFSAYSMVWVRQAPGKGLEWVSYIYPSGGITTYADSVKGRFTISRDNSKNTLYLQMNSLRAEDTAVYYCAREGQVFDIWGQGTTVTVSS

SEQ ID NO: 486 - protein, 118 aa, Artificial Sequence
  Made in a lab
EVQLLESGGGLVQPGGSLRLSCAASGFTFSNYAMGWVRQAPGKGLEWVSRIVPSGGMTSYADSVKGRFTISRDNSKNTLYLQMNSLRAEDTAVYYCTTDDFWSGMDVWGQGTTVTVSS

SEQ ID NO: 487 - protein, 121 aa, Artificial Sequence
  Made in a lab
EVQLLESGGGLVQPGGSLRLSCAASGFTFSLYNMQWVRQAPGKGLEWVSGISLSGGKTFYADSVKGRFTISRDNSKNTLYLQMNSLRAEDTAVYYCARDYGVATLDAFDIWGQGTMVTVSS

SEQ ID NO: 488 - protein, 127 aa, Artificial Sequence
  Made in a lab
EVQLLESGGGLVQPGGSLRLSCAASGFTFSAYTMHWVRQAPGKGLEWVSSIYPSGGTTPYADSVKGRFTISRDNSKNTLYLQMNSLRAEDTATYYCARVVNIDFWSGYNMRSAFDIWGQGTMVTVSS

SEQ ID NO: 489 - protein, 122 aa, Artificial Sequence
  Made in a lab
EVQLLESGGGLVQPGGSLRLSCAASGFTFSDYLMGWVRQAPGKGLEWVSVISSSGGPTAYADSVKGRFTISRDNSKNTLYLQMNSLRAEDTAVYYCARVGLDYGILGAFDIWGQGTMVTVSS

SEQ ID NO: 490 - protein, 120 aa, Artificial Sequence
  Made in a lab
EVQLLESGGGLVQPGGSLRLSCAASGFTFSEYGMSWVRQAPGKGLEWVSSIRSSGGWTKYADSVKGRFTISRDNSKNTLYLQMNSLRAEDTAVYYCAKGLGATSGEFDYWGQGTLVTVSS

SEQ ID NO: 491 - protein, 121 aa, Artificial Sequence
  Made in a lab
EVQLLESGGGLVQPGGSLRLSCAASGFTFSKYDMWWVRQAPGKGLEWVSSIWPSGGWTSYADSVKGRFTISRDNSKNTLYLQMNSLRAEDTAVYYCAKSRGSPWYGDFDHWGQGTLVTVSS

SEQ ID NO: 492 - protein, 118 aa, Artificial Sequence
  Made in a lab
EVQLLESGGGLVQPGGSLRLSCAASGFTFSMYTMHWVRQAPGKGLEWVSWISPSGGWTKYADSVKGRFTISRDNSKNTLYLQMNSLRAEDTAVYYCAVSPWGGPFDYWGQGTLVTVSS

SEQ ID NO: 493 - protein, 123 aa, Artificial Sequence
  Made in a lab
EVQLLESGGGLVQPGGSLRLSCAASGFTFSQYFMMWVRQAPGKGLEWVSSISPSGGYTQYADSVKGRFTISRDNSKNTLYLQMNSLRAEDTAVYYCAKTGDYTRYYSYGMDVWGQGTLVTVSS

SEQ ID NO: 494 - protein, 124 aa, Artificial Sequence
  Made in a lab
EVQLLESGGGLVQPGGSLRLSCAASGFTFSGYSMAWVRQAPGKGLEWVSGIYSSGGWTWYADSVKGRFTISRDNSKNTLYLQMNSLRAEDTAVYYCTRDQSFSYDSSLDAFDIWGQGTMVTVSS

SEQ ID NO: 495 - protein, 124 aa, Artificial Sequence
  Made in a lab
EVQLLESGGGLVQPGGSLRLSCAASGFTFSLYGMHWVRQAPGKGLEWVSSIVPSGGLTRYADSVKGRFTISRDNSKNTLYLQMNSLRAEDTATYYCARLAYYDFWSGRDAFDIWGQGTMVTVSS

SEQ ID NO: 496 - protein, 118 aa, Artificial Sequence
  Made in a lab
EVQLLESGGGLVQPGGSLRLSCAASGFTFSHYGMDWVRQAPGKGLEWVSSIYSSGGYTLYADSVKGRFTISRDNSKNTLYLQMNSLRAEDTATYYCATRTWADAFDVWGQGTTVTVSS

SEQ ID NO: 497 - protein, 2 aa, Artificial Sequence
  Made in a lab
NS

SEQ ID NO: 498 - protein, 6 aa, Artificial Sequence
  Made in a lab
SCPPCP

SEQ ID NO: 499 - protein, 8 aa, Artificial Sequence
  Made in a lab
GGGGSGNS

SEQ ID NO: 500 - protein, 8 aa, Artificial Sequence
  Made in a lab
GCPPCPNS

SEQ ID NO: 501 - protein, 8 aa, Artificial Sequence
  Made in a lab
GSPPSPNS

SEQ ID NO: 502 - protein, 8 aa, Artificial Sequence
  Made in a lab
GSPPSPNS

SEQ ID NO: 503 - protein, 8 aa, Artificial Sequence
  Made in a lab
GCPPCPNS

SEQ ID NO: 504 - protein, 8 aa, Artificial Sequence
  Made in a lab
GCPPCPNS

SEQ ID NO: 505 - protein, 9 aa, Artificial Sequence
  Made in a lab
GCPPCPGNS

SEQ ID NO: 506 - protein, 9 aa, Artificial Sequence
  Made in a lab
GCPPCPANS

SEQ ID NO: 507 - protein, 9 aa, Artificial Sequence
  Made in a lab
GCPPCPANS

SEQ ID NO: 508 - protein, 9 aa, Artificial Sequence
  Made in a lab
EEEEDEGNS

SEQ ID NO: 509 - protein, 10 aa, Artificial Sequence
  Made in a lab
NYGGGGSGNS

SEQ ID NO: 510 - protein, 10 aa, Artificial Sequence
  Made in a lab
VSERPFPPNS

SEQ ID NO: 511 - protein, 11 aa, Artificial Sequence
  Made in a lab
EPKSCDKTCCP

SEQ ID NO: 512 - protein, 11 aa, Artificial Sequence
  Made in a lab
SQPEIVPISNS

SEQ ID NO: 513 - protein, 12 aa, Artificial Sequence
  Made in a lab
GGGGSCPPCPNS

SEQ ID NO: 514 - protein, 12 aa, Artificial Sequence
  Made in a lab
KADFLTPSIGNS

SEQ ID NO: 515 - protein, 12 aa, Artificial Sequence
  Made in a lab
QMNSELSVLANS

SEQ ID NO: 516 - protein, 13 aa, Artificial Sequence
  Made in a lab
EPKSCDKTHTCCP

SEQ ID NO: 517 - protein, 13 aa, Artificial Sequence
  Made in a lab
EPKSCDKTCPPCP

SEQ ID NO: 518 - protein, 13 aa, Artificial Sequence
  Made in a lab
GGGGSGGGGSGNS

SEQ ID NO: 519 - protein, 13 aa, Artificial Sequence
  Made in a lab
GCPPCPGGGGSNS

SEQ ID NO: 520 - protein, 13 aa, Artificial Sequence
  Made in a lab
GGGGSCPPCPGNS

SEQ ID NO: 521 - protein, 13 aa, Artificial Sequence
  Made in a lab
GCPPCPGGGGSNS

SEQ ID NO: 522 - protein, 13 aa, Artificial Sequence
  Made in a lab
GGGASCPPCPGNS

SEQ ID NO: 523 - protein, 13 aa, Artificial Sequence
  Made in a lab
GGGASCPPCAGNS

SEQ ID NO: 524 - protein, 13 aa, Artificial Sequence
  Made in a lab
GGGASCPPCAGNS

SEQ ID NO: 525 - protein, 15 aa, Artificial Sequence
  Made in a lab
NYGGGGSGGGGSGNS

SEQ ID NO: 526 - protein, 15 aa, Artificial Sequence
  Made in a lab
LSVKADFLTPSIGNS

SEQ ID NO: 527 - protein, 15 aa, Artificial Sequence
  Made in a lab
LSVLANFSQPEIGNS

SEQ ID NO: 528 - protein, 15 aa, Artificial Sequence
  Made in a lab
LKIQERVSKPKISNS

SEQ ID NO: 529 - protein, 15 aa, Artificial Sequence
  Made in a lab
LDVSERPFPPHIQNS

SEQ ID NO: 530 - protein, 15 aa, Artificial Sequence
  Made in a lab
REQLAEVTLSLKANS

SEQ ID NO: 531 - protein, 15 aa, Artificial Sequence
  Made in a lab
RIHQMNSELSVLANS

SEQ ID NO: 532 - protein, 15 aa, Artificial Sequence
  Made in a lab
DTKGKNVLEKIFSNS

SEQ ID NO: 533 - protein, 15 aa, Artificial Sequence
  Made in a lab
LPPETQESQEVTLNS

SEQ ID NO: 534 - protein, 15 aa, Artificial Sequence
  Made in a lab
RIHLNVSERPFPPNS

SEQ ID NO: 535 - protein, 15 aa, Artificial Sequence
  Made in a lab
LSVKADFLTPSIGNS

SEQ ID NO: 536 - protein, 15 aa, Artificial Sequence
  Made in a lab
LSVLANFSQPEIGNS

SEQ ID NO: 537 - protein, 15 aa, Artificial Sequence
  Made in a lab
LSVLANFSQPEIGNS

SEQ ID NO: 538 - protein, 15 aa, Artificial Sequence
  Made in a lab
RIHQMNSELSVLANS

SEQ ID NO: 539 - protein, 15 aa, Artificial Sequence
  Made in a lab
KPFFTCGSADTCPNS

SEQ ID NO: 540 - protein, 15 aa, Artificial Sequence
  Made in a lab
KPFFTCGSADTCPNS

SEQ ID NO: 541 - protein, 15 aa, Artificial Sequence
  Made in a lab
QYNCPGQYTFSMPNS

SEQ ID NO: 542 - protein, 15 aa, Artificial Sequence
  Made in a lab
GGGGSGGGGSGGGGS

SEQ ID NO: 543 - protein, 15 aa, Artificial Sequence
  Made in a lab
EPKSSDKTHTCPPCP

SEQ ID NO: 544 - protein, 15 aa, Artificial Sequence
  Made in a lab
EPKSSDKTHTCPPCS

SEQ ID NO: 545 - protein, 15 aa, Artificial Sequence
  Made in a lab
EPKSCDKTHTSPPCS

SEQ ID NO: 546 - protein, 15 aa, Artificial Sequence
  Made in a lab
EPKSCDKTHTCPPCP

SEQ ID NO: 547 - protein, 15 aa, Artificial Sequence
  Made in a lab
EPKSCDKTHTSPPSS

SEQ ID NO: 548 - protein, 15 aa, Artificial Sequence
  Made in a lab
PRGPTIKPCPPCKCP

SEQ ID NO: 549 - protein, 15 aa, Artificial Sequence
  Made in a lab
EPKSSDKTHTSPPSS

SEQ ID NO: 550 - protein, 15 aa, Artificial Sequence
  Made in a lab
EPKSSDKTHTSPPCS

SEQ ID NO: 551 - protein, 15 aa, Artificial Sequence
  Made in a lab
EPKSSDKTHTCPPSS

SEQ ID NO: 552 - protein, 15 aa, Artificial Sequence
  Made in a lab
EPKSCDKTHTSPPCP

SEQ ID NO: 553 - protein, 15 aa, Artificial Sequence
  Made in a lab
EPKSSDKTHTSPPSP

SEQ ID NO: 554 - protein, 15 aa, Artificial Sequence
  Made in a lab
EPKSSDKTHTSPPCP

SEQ ID NO: 555 - protein, 15 aa, Artificial Sequence
  Made in a lab
EPKSCDKTHTSPPSP

SEQ ID NO: 556 - protein, 15 aa, Artificial Sequence
  Made in a lab
EPKSSDKTHTCPPSP

SEQ ID NO: 557 - protein, 15 aa, Artificial Sequence
  Made in a lab
GGGGCDKTHTCPPCP

SEQ ID NO: 558 - protein, 15 aa, Artificial Sequence
  Made in a lab
EPKSCGGGGGCPPCP

SEQ ID NO: 559 - protein, 15 aa, Artificial Sequence
  Made in a lab
EPKSCDKTHTCGGCP

SEQ ID NO: 560 - protein, 15 aa, Artificial Sequence
  Made in a lab
EPKSCDKTHTCPPCG

SEQ ID NO: 561 - protein, 15 aa, Artificial Sequence
  Made in a lab
EPKSCDKTHTCPPSP

SEQ ID NO: 562 - protein, 15 aa, Artificial Sequence
  Made in a lab
EPKSCDKCHTCPPCP

SEQ ID NO: 563 - protein, 15 aa, Artificial Sequence
  Made in a lab
EPKSCDKTCCCPPCP

SEQ ID NO: 564 - protein, 15 aa, Artificial Sequence
  Made in a lab
EPKSCPPPPPCPPCP

SEQ ID NO: 565 - protein, 15 aa, Artificial Sequence
  Made in a lab
PPPPCDKTHTCPPCP

SEQ ID NO: 566 - protein, 15 aa, Artificial Sequence
  Made in a lab
EPKSCDKTHTCWWCP

SEQ ID NO: 567 - protein, 15 aa, Artificial Sequence
  Made in a lab
EPKSCDWWHTCPPCP

SEQ ID NO: 568 - protein, 15 aa, Artificial Sequence
  Made in a lab
EPKCSDKTHTCPPCP

SEQ ID NO: 569 - protein, 15 aa, Artificial Sequence
  Made in a lab
EPKSDCKTHTCPPCP

SEQ ID NO: 570 - protein, 15 aa, Artificial Sequence
  Made in a lab
EPKSDCWWHTCPPCP

SEQ ID NO: 571 - protein, 15 aa, Artificial Sequence
  Made in a lab
EPKSCDFFHTCPPCP

SEQ ID NO: 572 - protein, 15 aa, Artificial Sequence
  Made in a lab
EPKSCDWWWTCPPCP

SEQ ID NO: 573 - protein, 15 aa, Artificial Sequence
  Made in a lab
EPKSCWWTHTCPPCP

SEQ ID NO: 574 - protein, 15 aa, Artificial Sequence
  Made in a lab
EPWWCDKTHTCPPCP

SEQ ID NO: 575 - protein, 16 aa, Artificial Sequence
  Made in a lab
SQPEIVPISCPPCPNS

SEQ ID NO: 576 - protein, 17 aa, Artificial Sequence
  Made in a lab
TGEPKSSDKTHTCPPCP

SEQ ID NO: 577 - protein, 17 aa, Artificial Sequence
  Made in a lab
EPKSTDKTHTCPPCPNS

SEQ ID NO: 578 - protein, 17 aa, Artificial Sequence
  Made in a lab
EPKSTDKTHTSPPSPNS

SEQ ID NO: 579 - protein, 17 aa, Artificial Sequence
  Made in a lab
EPKSTDKTHTCPPCPNS

SEQ ID NO: 580 - protein, 17 aa, Artificial Sequence
  Made in a lab
EPKSSDKTHTCPPCPNS

SEQ ID NO: 581 - protein, 18 aa, Artificial Sequence
  Made in a lab
EPKSCDKTHTCPGGGPCP

SEQ ID NO: 582 - protein, 18 aa, Artificial Sequence
  Made in a lab
EPKSCDGGGKTHTCPPCP

SEQ ID NO: 583 - protein, 18 aa, Artificial Sequence
  Made in a lab
EPKSCDPPPKTHTCPPCP

SEQ ID NO: 584 - protein, 18 aa, Artificial Sequence
  Made in a lab
EPKSCDKTHTCPPPPPCP

SEQ ID NO: 585 - protein, 18 aa, Artificial Sequence
  Made in a lab
GGGGSGGGGSGGGGSGNS

SEQ ID NO: 586 - protein, 19 aa, Artificial Sequence
  Made in a lab
NYGGGGSGGGGSGGGGSNS

SEQ ID NO: 587 - protein, 19 aa, Artificial Sequence
  Made in a lab
LSVKADFLTPSISPPCPNS

SEQ ID NO: 588 - protein, 19 aa, Artificial Sequence
  Made in a lab
SVLANFSQPEISCPPCPNS

SEQ ID NO: 589 - protein, 20 aa, Artificial Sequence
  Made in a lab
GQRHNNSSLNTRTQKARHSP

SEQ ID NO: 590 - protein, 20 aa, Artificial Sequence
  Made in a lab
LSVLANFSQPEISCPPCPNS

SEQ ID NO: 591 - protein, 20 aa, Artificial Sequence
  Made in a lab
LKIQERVSKPKISCPPCPNS

SEQ ID NO: 592 - protein, 20 aa, Artificial Sequence
  Made in a lab
REQLAEVTLSLKACPPCPNS

SEQ ID NO: 593 - protein, 20 aa, Artificial Sequence
  Made in a lab
RIHQMNSELSVLACPPCPNS

SEQ ID NO: 594 - protein, 20 aa, Artificial Sequence
  Made in a lab
RIHLNVSERPFPPCPPCPNS

SEQ ID NO: 595 - protein, 20 aa, Artificial Sequence
  Made in a lab
NSLFNQEVQIPLTESYCPNS

SEQ ID NO: 596 - protein, 20 aa, Artificial Sequence
  Made in a lab
EEEEDEEDEEDEEEEEDGNS

SEQ ID NO: 597 - protein, 21 aa, Artificial Sequence
  Made in a lab
LDVSERPFPPHIQSCPPCPNS

SEQ ID NO: 598 - protein, 21 aa, Artificial Sequence
  Made in a lab
DTKGKNVLEKIFDSCPPCPNS

SEQ ID NO: 599 - protein, 21 aa, Artificial Sequence
  Made in a lab
LPPETQESQEVTLSCPPCPNS

SEQ ID NO: 600 - protein, 21 aa, Artificial Sequence
  Made in a lab
EPAFTPGPNIELQKDSDCPNS

SEQ ID NO: 601 - protein, 21 aa, Artificial Sequence
  Made in a lab
QRHNNSSLNTRTQKARHCPNS

SEQ ID NO: 602 - protein, 21 aa, Artificial Sequence
  Made in a lab
QRHNNSSLNTRTQKARHSPNS

SEQ ID NO: 603 - protein, 36 aa, Artificial Sequence
  Made in a lab
NYGGGGSGGGGSGGGGSNYGGGGSGGGGSGGGGSNS

SEQ ID NO: 604 - protein, 122 aa, Artificial Sequence
  Made in a lab
RTRYLQVSQQLQQTNRVLEVTNSSLRQQLRLKITQLGQSAEDLQGSRRELAQSQEALQVEQRAHQAAEGQLQACQADRQKTKETLQSEEQQRRALEQKLSNMENRLKPFFTCGSADTCCPNS

SEQ ID NO: 605 - DNA, 1971 bp, Artificial Sequence
  Made in a lab
aagcttgccgccatggattttcaagtgcagattttcagcttcctgctaatcagtgcttcagtcataattgccagaggagtcgaccccgaggagccccagctctcctgcttccggaagagccccctcagcaatgttgtttgtgagtggggtcctcggagcaccccatccctgacgacaaaggctgtgctcttggtgaggaagtttcagaacagtccggccgaagacttccaggagccgtgccagtattcccaggagtcccagaagttctcctgccagttagcagtcccggagggagacagctctttctacatagtgtccatgtgcgtcgccagtagtgtcgggagcaagttcagcaaaactcaaacctttcagggttgtggaatcttgcagcctgatccgcctgccaacatcacagtcactgccgtggccagaaacccccgctggctcagtgtcacctggcaagacccccactcctggaactcatctttctacagactacggtttgagctcagatatcgggctgaacggtcaaagacattcacaacatggatggtcaaggacctccagcatcactgtgtcatccacgacgcctggagcggcctgaggcacgtggtgcagcttcgtgcccaggaggagttcgggcaaggcgagtggagcgagtggagcccggaggccatgggcacgccttggacagaatccaggagtcctccagctggaggcggatctgatgtagccgccccacacagacagccactcacctcttcagaacgaattgacaaacaaattcggtacatcctcgacggcatctcagccctgagaaaggagacatgtaacaagagtaacatgtgtgaaagcagcaaagaggcactggcagaaaacaacctgaaccttccaaagatggctgaaaaagatggatgcttccaatctggattcaatgaggagacttgcctggtgaaaatcatcactggtcttttggagtttgaggtatacctagagtacctccagaacagatttgagagtagtgaggaacaagccagagctgtgcagatgagtacaaaagtcctgatccagttcctgcagaaaaaggcaaagaatctagatgcaataaccacccctgacccaaccacaaatgccagcctgctgacgaagctgcaggcacagaaccagtggctgcaggacatgacaactcatctcattctgcgcagctttaaggagttcctgcagtccagcctgagggctcttcggcaaatggatcagcccagagggcccacaatcaagccctgtcctccatgcaaatgcccggctccaaatcttcttggtggttcatccgtcttcatcttccctccaaagatcaaggatgtactcatgatctccctgagccccatagtcacatgtgtggtggtggatgtgagcgaggacgacccagatgtccagatcagctggtttgtgaacaacgtggaagtacacacagctcagacacaaacccatagagaggattacaacagtactctccgggtggtcagtgccctccccatccagcaccaggactggatgagtggcaaggagttcaaatgcaaggtcaacaacaaagacctcccagcgcccatcgagagaaccatctcaaaacccaaagggtcagtaagagctccacaggtatatgtcttgcctccaccagaagaagagatgactaagaaacaggtcactctgacctgcatggtcacagacttcatgcctgaagacatttacgtggagtggactaacaacgggaaaacagagctaaactacaagaacactgaaccagtcctggactctgatggttcttacttcatgtacagcaagctgagagtggaaaagaagaactgggtggaaagaaatagctactcctgttcagtggtccacgagggtctgcacaatcaccacacgactaagagcttctcccggactccgggtaaatgattctagagcggccgc

SEQ ID NO: 606 - protein, 647 aa, Artificial Sequence
  Made in a lab
MDFQVQIFSFLLISASVIIARGVDPEEPQLSCFRKSPLSNVVCEWGPRSTPSLTTKAVLLVRKFQNSPAEDFQEPCQYSQESQKFSCQLAVPEGDSSFYIVSMCVASSVGSKFSKTQTFQGCGILQPDPPANITVTAVARNPRWLSVTWQDPHSWNSSFYRLRFELRYRAERSKTFTTWMVKDLQHHCVIHDAWSGLRHVVQLRAQEEFGQGEWSEWSPEAMGTPWTESRSPPAGGGSDVAAPHRQPLTSSERIDKQIRYILDGISALRKETCNKSNMCESSKEALAENNLNLPKMAEKDGCFQSGFNEETCLVKIITGLLEFEVYLEYLQNRFESSEEQARAVQMSTKVLIQFLQKKAKNLDAITTPDPTTNASLLTKLQAQNQWLQDMTTHLILRSFKEFLQSSLRALRQMDQPRGPTIKPCPPCKCPAPNLLGGSSVFIFPPKIKDVLMISLSPIVTCVVVDVSEDDPDVQISWFVNNVEVHTAQTQTHREDYNSTLRVVSALPIQHQDWMSGKEFKCKVNNKDLPAPIERTISKPKGSVRAPQVYVLPPPEEEMTKKQVTLTCMVTDFMPEDIYVEWTNNGKTELNYKNTEPVLDSDGSYFMYSKLRVEKKNWVERNSYSCSVVHEGLHNHHTTKSFSRTPGK

SEQ ID NO: 607 - protein, 749 aa, Artificial Sequence
  Made in a lab
MDFQVQIFSFLLISASVIMSRGLPAQVAFTPYAPEPGSTCRLREYYDQTAQMCCSKCSPGQHAKVFCTKTSDTVCDSCEDSTYTQLWNWVPECLSCGSRCSSDQVETQACTREQNRICTCRPGWYCALSKQEGCRLCAPLRKCRPGFGVARPGTETSDVVCKPCAPGTFSNTTSSTDICRPHQICNVVAIPGNASMDAVCTSTSPTRSMAPGAVHLPQPVSTRSQHTQPTPEPSTAPSTSFLLPMGPSPPAEGSTGDTGEPKSSDKTHTCPPCPAPEAAGAPSVFLFPPKPKDTLMISRTPEVTCVVVDVSHEDPEVKFNWYVDGVEVHNAKTKPREEQYNSTYRVVSVLTVLHQDWLNGKAYACAVSNKALPAPIEKTISKAKGQPREPQVYTLPPSRDELTKNQVSLTCLVKGFYPSDIAVEWESNGQPENNYKTTPPVLDSDGSFFLYSKLTVDKSRWQQGNVFSCSVMHEALHNHYTQKSLSLSPGQRHNNSSLNTRTQKARHSPNSEVQLLESGGGLVQPGGSLRLSCAASGFTFSKYSMHWVRQAPGKGLEWVSSIWPSGGWTTYADSVKGRFTISRDNSKNTLYLQMNSLRAEDTAVYYCARGGYYYALDYWGQGTLVTVSSGGGGSGGGGSGGGGSQSELTQPPSVSVSPGQTATITCSGEKLGDIYASWYQQKPGQSPVLVIYQDTKRPSGIPVRFSGSNSGNTATLTISGTQAMDEADYYCQAWDSSTVFGGGTKLTVL

SEQ ID NO: 608 - protein, 758 aa, Artificial Sequence [sequence omitted]

SEQ ID NO: 609 - protein, 751 aa, Artificial Sequence
  Made in a lab
MDFQVQIFSFLLISASVIMSRGLPAQVAFTPYAPEPGSTCRLREYYDQTAQMCCSKCSPGQHAKVFCTKTSDTVCDSCEDSTYTQLWNWVPECLSCGSRCSSDQVETQACTREQNRICTCRPGWYCALSKQEGCRLCAPLRKCRPGFGVARPGTETSDVVCKPCAPGTFSNTTSSTDICRPHQICNVVAIPGNASMDAVCTSTSPTRSMAPGAVHLPQPVSTRSQHTQPTPEPSTAPSTSFLLPMGPSPPAEGSTGDTGEPKSSDKTHTCPPCPAPEAAGAPSVFLFPPKPKDTLMISRTPEVTCVVVDVSHEDPEVKFNWYVDGVEVHNAKTKPREEQYNSTYRVVSVLTVLHQDWLNGKAYACAVSNKALPAPIEKTISKAKGQPREPQVYTLPPSRDELTKNQVSLTCLVKGFYPSDIAVEWESNGQPENNYKTTPPVLDSDGSFFLYSKLTVDKSRWQQGNVFSCSVMHEALHNHYTQKSLSLSPGQRHNNSSLNTRTQKARHSPNSEVQLLESGGGLVQPGGSLRLSCAASGFTFSKYSMHWVRQAPGKGLEWVSGISPSGYTRYADSVKGRFTISRDNSKNTLYLQMNSLRAEDTAVYYCARDQLLEAFDIWGQGTTVTVSSGGGGSGGGGSGGGGSQDIQMTQSPLSLSASVGDRVTITCRASQSISSYLNWYQQKPGEAPKLLIYAASALQSGVPSRFSGSGLGTVFTLTITSLQPEDSATYYCQQSYSPPVTFGGGTKVEIK

SEQ ID NO: 610 - protein, 752 aa, Artificial Sequence
  Made in a lab
MDFQVQIFSFLLISASVIMSRGLPAQVAFTPYAPEPGSTCRLREYYDQTAQMCCSKCSPGQHAKVFCTKTSDTVCDSCEDSTYTQLWNWVPECLSCGSRCSSDQVETQACTREQNRICTCRPGWYCALSKQEGCRLCAPLRKCRPGFGVARPGTETSDVVCKPCAPGTFSNTTSSTDICRPHQICNVVAIPGNASMDAVCTSTSPTRSMAPGAVHLPQPVSTRSQHTQPTPEPSTAPSTSFLLPMGPSPPAEGSTGDTGEPKSSDKTHTCPPCPAPEAAGAPSVFLFPPKPKDTLMISRTPEVTCVVVDVSHEDPEVKFNWYVDGVEVHNAKTKPREEQYNSTYRVVSVLTVLHQDWLNGKAYACAVSNKALPAPIEKTISKAKGQPREPQVYTLPPSRDELTKNQVSLTCLVKGFYPSDIAVEWESNGQPENNYKTTPPVLDSDGSFFLYSKLTVDKSRWQQGNVFSCSVMHEALHNHYTQKSLSLSPGQRHNNSSLNTRTQKARHSPNSEVQLLESGGGLVQPGGSLRLSCAASGFTFSEYPMNWVRQAPGKGLEWVSGIYSSGGLTKYADSVKGRFTISRDNSKNTLYLQMNSLRAEDTAVYYCARDHYGDYAFDYWGQGTLVTVSSGGGGSGGGGSGGGGSQDIQMTQSPSTLSASVGDRVTITCRASQSISSWLAWYQQKPGKAPKLLIYKASSLESGVPSRFSGSGSGTEFTLTISSLQPDDFATYYCQQYNSYWTFGQGTKVEIK

SEQ ID NO: 611 - protein, 761 aa, Artificial Sequence [sequence omitted]

SEQ ID NO: 612 - protein, 759 aa, Artificial Sequence
  Made in a lab
MDFQVQIFSFLLISASVIMSRGLPAQVAFTPYAPEPGSTCRLREYYDQTAQMCCSKCSPGQHAKVFCTKTSDTVCDSCEDSTYTQLWNWVPECLSCGSRCSSDQVETQACTREQNRICTCRPGWYCALSKQEGCRLCAPLRKCRPGFGVARPGTETSDVVCKPCAPGTFSNTTSSTDICRPHQICNVVAIPGNASMDAVCTSTSPTRSMAPGAVHLPQPVSTRSQHTQPTPEPSTAPSTSFLLPMGPSPPAEGSTGDTGEPKSSDKTHTCPPCPAPEAAGAPSVFLFPPKPKDTLMISRTPEVTCVVVDVSHEDPEVKFNWYVDGVEVHNAKTKPREEQYNSTYRVVSVLTVLHQDWLNGKAYACAVSNKALPAPIEKTISKAKGQPREPQVYTLPPSRDELTKNQVSLTCLVKGFYPSDIAVEWESNGQPENNYKTTPPVLDSDGSFFLYSKLTVDKSRWQQGNVFSCSVMHEALHNHYTQKSLSLSPGQRHNNSSLNTRTQKARHSPNSEVQLLESGGGLVQPGGSLRLSCAASGFTFSQYNMIWVRQAPGKGLEWVSWISSSGGTEYADSVKGRFTISRDNSKNTLYLQMNSLRAEDTAVYYCAKDRGYGSGSYGAYDAFDIWGQGTMVTVSSGGGGSGGGGSGGGGSQDIQMTQSPSSLSASVGDRVTITCQTSQSIDRYLNWYQQKAGEAPKLLIYAASSLQSGVPSRFSGSGSGTDFTLTISSLQPEDFASYYCQQSYRTPRTFGQGTKVEIK

SEQ ID NO: 613 - protein, 754 aa, Artificial Sequence
  Made in a lab
MDFQVQIFSFLLISASVIMSRGLPAQVAFTPYAPEPGSTCRLREYYDQTAQMCCSKCSPGQHAKVFCTKTSDTVCDSCEDSTYTQLWNWVPECLSCGSRCSSDQVETQACTREQNRICTCRPGWYCALSKQEGCRLCAPLRKCRPGFGVARPGTETSDVVCKPCAPGTFSNTTSSTDICRPHQICNVVAIPGNASMDAVCTSTSPTRSMAPGAVHLPQPVSTRSQHTQPTPEPSTAPSTSFLLPMGPSPPAEGSTGDTGEPKSSDKTHTCPPCPAPEAAGAPSVFLFPPKPKDTLMISRTPEVTCVVVDVSHEDPEVKFNWYVDGVEVHNAKTKPREEQYNSTYRVVSVLTVLHQDWLNGKAYACAVSNKALPAPIEKTISKAKGQPREPQVYTLPPSRDELTKNQVSLTCLVKGFYPSDIAVEWESNGQPENNYKTTPPVLDSDGSFFLYSKLTVDKSRWQQGNVFSCSVMHEALHNHYTQKSLSLSPGQRHNNSSLNTRTQKARHSPNSEVQLLESGGGLVQPGGSLRLSCAASGFTFSHYSMGWVRQAPGKGLEWVSSIYPSGGSTLYADSVKGRFTISRDNSKNTLYLQMNSLRAEDTAVYYCARWGVGATFDYWGQGTLVTVSSGGGGSGGGGSGGGGSQDIQMTQSPGTLSLSPGERATLSCRASQSVSSSYLAWYQQKPGQAPRLLIYGASSRATGIPDRFSGSGSGTDFTLTISRLEPEDFAVYYCQQYGSSPLWTFGQGTKVEIK

SEQ ID NO: 614 - protein, 752 aa, Artificial Sequence
  Made in a lab
MDFQVQIFSFLLISASVIMSRGLPAQVAFTPYAPEPGSTCRLREYYDQTAQMCCSKCSPGQHAKVFCTKTSDTVCDSCEDSTYTQLWNWVPECLSCGSRCSSDQVETQACTREQNRICTCRPGWYCALSKQEGCRLCAPLRKCRPGFGVARPGTETSDVVCKPCAPGTFSNTTSSTDICRPHQICNVVAIPGNASMDAVCTSTSPTRSMAPGAVHLPQPVSTRSQHTQPTPEPSTAPSTSFLLPMGPSPPAEGSTGDTGEPKSSDKTHTCPPCPAPEAAGAPSVFLFPPKPKDTLMISRTPEVTCVVVDVSHEDPEVKFNWYVDGVEVHNAKTKPREEQYNSTYRVVSVLTVLHQDWLNGKAYACAVSNKALPAPIEKTISKAKGQPREPQVYTLPPSRDELTKNQVSLTCLVKGFYPSDIAVEWESNGQPENNYKTTPPVLDSDGSFFLYSKLTVDKSRWQQGNVFSCSVMHEALHNHYTQKSLSLSPGQRHNNSSLNTRTQKARHSPNSEVQLLESGGGLVQPGGSLRLSCAASGFTFSHYMMAWVRQAPGKGLEWVSYIYPSGGWTSYADSVKGRFTISRDNSKNTLYLQMNSLRAEDTAVYYCARFDYTIGFDFWGQGTLVTVSSGGGGSGGGGSGGGGSQDIQMTQSPSSLSASVGDRVTITCRASQSISSYLNWYQQKPGKAPKLLIYAASSLQSGVPSRFSGSGSGTDFTLTISSLQPEDFATYYCQQSYSTPRTFGQGTKVEIK

SEQ ID NO: 615 - protein, 756 aa, Artificial Sequence
  Made in a lab
MDFQVQIFSFLLISASVIMSRGLPAQVAFTPYAPEPGSTCRLREYYDQTAQMCCSKCSPGQHAKVFCTKTSDTVCDSCEDSTYTQLWNWVPECLSCGSRCSSDQVETQACTREQNRICTCRPGWYCALSKQEGCRLCAPLRKCRPGFGVARPGTETSDVVCKPCAPGTFSNTTSSTDICRPHQICNVVAIPGNASMDAVCTSTSPTRSMAPGAVHLPQPVSTRSQHTQPTPEPSTAPSTSFLLPMGPSPPAEGSTGDTGEPKSSDKTHTCPPCPAPEAAGAPSVFLFPPKPKDTLMISRTPEVTCVVVDVSHEDPEVKFNWYVDGVEVHNAKTKPREEQYNSTYRVVSVLTVLHQDWLNGKAYACAVSNKALPAPIEKTISKAKGQPREPQVYTLPPSRDELTKNQVSLTCLVKGFYPSDIAVEWESNGQPENNYKTTPPVLDSDGSFFLYSKLTVDKSRWQQGNVFSCSVMHEALHNHYTQKSLSLSPGQRHNNSSLNTRTQKARHSPNSEVQLLESGGGLVQPGGSLRLSCAASGFTFSHYGMTWVRQAPGKGLEWVSGIRSSGGVTNYADSVKGRFTISRDNSKNTLYLQMNSLRAEDTAVYYCAREGSGWSKAFDIWGQGTMVTVSSGGGGSGGGGSGGGGSQDIQMTQSPATLSLSPGERATLSCRASQSISTSLAWYQQIPGQAPRLLMYDASKRASGIPARFSGSGSGTDLTLTISSLEPEDSAVYYCQLRINWPPEFTFGPGTKVDIK

SEQ ID NO: 616 - protein, 761 aa, Artificial Sequence
  Made in a lab
MDFQVQIFSFLLISASVIMSRGLPAQVAFTPYAPEPGSTCRLREYYDQTAQMCCSKCSPGQHAKVFCTKTSDTVCDSCEDSTYTQLWNWVPECLSCGSRCSSDQVETQACTREQNRICTCRPGWYCALSKQEGCRLCAPLRKCRPGFGVARPGTETSDVVCKPCAPGTFSNTTSSTDICRPHQICNVVAIPGNASMDAVCTSTSPTRSMAPGAVHLPQPVSTRSQHTQPTPEPSTAPSTSFLLPMGPSPPAEGSTGDTGEPKSSDKTHTCPPCPAPEAAGAPSVFLFPPKPKDTLMISRTPEVTCVVVDVSHEDPEVKFNWYVDGVEVHNAKTKPREEQYNSTYRVVSVLTVLHQDWLNGKAYACAVSNKALPAPIEKTISKAKGQPREPQVYTLPPSRDELTKNQVSLTCLVKGFYPSDIAVEWESNGQPENNYKTTPPVLDSDGSFFLYSKLTVDKSRWQQGNVFSCSVMHEALHNHYTQKSLSLSPGQRHNNSSLNTRTQKARHSPNSEVQLLESGGGLVQPGGSLRLSCAASGFTFSHYNMRWVRQAPGKGLEWVSSISPSGGFTGYADSVKGRFTISRDNSKNTLYLQMNSLRAEDTAVYYCARGINYYDSSGYYPPVGMDVWGQGTTVTVSSGGGGSGGGGSGGGGSQDIQMTQSPSSVSASVGDRVTITCRASRGVITWLNWYQQKPGRVPSPLIFGASTLQTGVPSRFSGSGSGTDFTLTINDLQPEDFATYYCQQTHSFPLTFGGGTKVEIK

SEQ ID NO: 617 - protein, 755 aa, Artificial Sequence
  Made in a lab
MDFQVQIFSFLLISASVIMSRGLPAQVAFTPYAPEPGSTCRLREYYDQTAQMCCSKCSPGQHAKVFCTKTSDTVCDSCEDSTYTQLWNWVPECLSCGSRCSSDQVETQACTREQNRICTCRPGWYCALSKQEGCRLCAPLRKCRPGFGVARPGTETSDVVCKPCAPGTFSNTTSSTDICRPHQICNVVAIPGNASMDAVCTSTSPTRSMAPGAVHLPQPVSTRSQHTQPTPEPSTAPSTSFLLPMGPSPPAEGSTGDTGEPKSSDKTHTCPPCPAPEAAGAPSVFLFPPKPKDTLMISRTPEVTCVVVDVSHEDPEVKFNWYVDGVEVHNAKTKPREEQYNSTYRVVSVLTVLHQDWLNGKAYACAVSNKALPAPIEKTISKAKGQPREPQVYTLPPSRDELTKNQVSLTCLVKGFYPSDIAVEWESNGQPENNYKTTPPVLDSDGSFFLYSKLTVDKSRWQQGNVFSCSVMHEALHNHYTQKSLSLSPGQRHNNSSLNTRTQKARHSPNSEVQLLESGGGLVQPGGSLRLSCAASGFTFSWYNMLWVRQAPGKGLEWVSSISPSGGYTVYADSVKGRFTISRDNSKNTLYLQMNSLRAEDTAVYYCARDRGGSPFRPDAFDIWGQGTMVTVSSGGGGSGGGGSGGGGSQSALTQPPSVSVSPGQTARITCSGDKLGEKYVSWYQQRSGQSPLLVISQDTKRPSGIPERFSGSNSGNTATLTISGAQAADEADYYCQTWDSDTYVFGSGSTVTVL

SEQ ID NO: 618 - protein, 759 aa, Artificial Sequence [sequence omitted]

SEQ ID NO: 619 - protein, 756 aa, Artificial Sequence
  Made in a lab
MDFQVQIFSFLLISASVIMSRGLPAQVAFTPYAPEPGSTCRLREYYDQTAQMCCSKCSPGQHAKVFCTKTSDTVCDSCEDSTYTQLWNWVPECLSCGSRCSSDQVETQACTREQNRICTCRPGWYCALSKQEGCRLCAPLRKCRPGFGVARPGTETSDVVCKPCAPGTFSNTTSSTDICRPHQICNVVAIPGNASMDAVCTSTSPTRSMAPGAVHLPQPVSTRSQHTQPTPEPSTAPSTSFLLPMGPSPPAEGSTGDTGEPKSSDKTHTCPPCPAPEAAGAPSVFLFPPKPKDTLMISRTPEVTCVVVDVSHEDPEVKFNWYVDGVEVHNAKTKPREEQYNSTYRVVSVLTVLHQDWLNGKAYACAVSNKALPAPIEKTISKAKGQPREPQVYTLPPSRDELTKNQVSLTCLVKGFYPSDIAVEWESNGQPENNYKTTPPVLDSDGSFFLYSKLTVDKSRWQQGNVFSCSVMHEALHNHYTQKSLSLSPGQRHNNSSLNTRTQKARHSPNSEVQLLESGGGLVQPGGSLRLSCAASGFTFSGYVMGWVRQAPGKGLEWVSSISPSGGYTLYADSVKGRFTISRDNSKNTLYLQMNSLRAEDTAVYYCARAFSTRWYWGAFDIWGQGTMVTVSSGGGGSGGGGSGGGGSQDIQMTQSPATLSLSPGERATLSCRASQSVRSYLAWYQQKPGQAPRLLIYDASNRATGIPARFSGSGSGTDFTLTITSLQPEDIATYYCQQYDNLPLTFGGGTKVEIK

SEQ ID NO: 620 - protein, 759 aa, Artificial Sequence [sequence omitted]

SEQ ID NO: 621 - protein, 756 aa, Artificial Sequence
  Made in a lab
MDFQVQIFSFLLISASVIMSRGLPAQVAFTPYAPEPGSTCRLREYYDQTAQMCCSKCSPGQHAKVFCTKTSDTVCDSCEDSTYTQLWNWVPECLSCGSRCSSDQVETQACTREQNRICTCRPGWYCALSKQEGCRLCAPLRKCRPGFGVARPGTETSDVVCKPCAPGTFSNTTSSTDICRPHQICNVVAIPGNASMDAVCTSTSPTRSMAPGAVHLPQPVSTRSQHTQPTPEPSTAPSTSFLLPMGPSPPAEGSTGDTGEPKSSDKTHTCPPCPAPEAAGAPSVFLFPPKPKDTLMISRTPEVTCVVVDVSHEDPEVKFNWYVDGVEVHNAKTKPREEQYNSTYRVVSVLTVLHQDWLNGKAYACAVSNKALPAPIEKTISKAKGQPREPQVYTLPPSRDELTKNQVSLTCLVKGFYPSDIAVEWESNGQPENNYKTTPPVLDSDGSFFLYSKLTVDKSRWQQGNVFSCSVMHEALHNHYTQKSLSLSPGQRHNNSSLNTRTQKARHSPNSEVQLLESGGGLVQPGGSLRLSCAASGFTFSLYDMHWVRQAPGKGLEWVSRIYSSGGTTQYADSVKGRFTISRDNSKNTLYLQMNSLRAEDTAMYYCARDPGYGSHHSFDYWGQGTLVTVSSGGGGSGGGGSGGGGSQDIQMTQSPSTLSASVGDRVTITCRASQSMSNWLAWYQQKPGKAPKLLIYDVFTLKSGVPSRFSGSRSGTEFTLTISSLQPDDFATYYCQQYSDYSGITFGPGTEVDIR

SEQ ID NO: 622 - protein, 754 aa, Artificial Sequence [sequence omitted]

SEQ ID NO: 623 - protein, 752 aa, Artificial Sequence [sequence omitted]

SEQ ID NO: 624 - protein, 751 aa, Artificial Sequence
  Made in a lab
MDFQVQIFSFLLISASVIMSRGLPAQVAFTPYAPEPGSTCRLREYYDQTAQMCCSKCSPGQHAKVFCTKTSDTVCDSCEDSTYTQLWNWVPECLSCGSRCSSDQVETQACTREQNRICTCRPGWYCALSKQEGCRLCAPLRKCRPGFGVARPGTETSDVVCKPCAPGTFSNTTSSTDICRPHQICNVVAIPGNASMDAVCTSTSPTRSMAPGAVHLPQPVSTRSQHTQPTPEPSTAPSTSFLLPMGPSPPAEGSTGDTGEPKSSDKTHTCPPCPAPEAAGAPSVFLFPPKPKDTLMISRTPEVTCVVVDVSHEDPEVKFNWYVDGVEVHNAKTKPREEQYNSTYRVVSVLTVLHQDWLNGKAYACAVSNKALPAPIEKTISKAKGQPREPQVYTLPPSRDELTKNQVSLTCLVKGFYPSDIAVEWESNGQPENNYKTTPPVLDSDGSFFLYSKLTVDKSRWQQGNVFSCSVMHEALHNHYTQKSLSLSPGQRHNNSSLNTRTQKARHSPNSEVQLLESGGGLVQPGGSLRLSCAASGFTFSDYPMQWVRQAPGKGLEWVSWIGPSGGWTVYADSVKGRFTISRDNSKNTLYLQMNSLRAEDTAVYYCARDDGIAGFLWGQGTLVTVSSGGGGSGGGGSGGGGSQDIQMTQSPLSLSASVGDRVTITCQASRDISIYLNWYQQKPGKVPKLLIFGASTLRSGVPSRFSGSGSGTDFTLTITSLQPEDVATYYCQKYNSAPYTFGPGTKVEIR

SEQ ID NO: 625 - protein, 759 aa, Artificial Sequence
  Made in a lab
MDFQVQIFSFLLISASVIMSRGLPAQVAFTPYAPEPGSTCRLREYYDQTAQMCCSKCSPGQHAKVFCTKTSDTVCDSCEDSTYTQLWNWVPECLSCGSRCSSDQVETQACTREQNRICTCRPGWYCALSKQEGCRLCAPLRKCRPGFGVARPGTETSDVVCKPCAPGTFSNTTSSTDICRPHQICNVVAIPGNASMDAVCTSTSPTRSMAPGAVHLPQPVSTRSQHTQPTPEPSTAPSTSFLLPMGPSPPAEGSTGDTGEPKSSDKTHTCPPCPAPEAAGAPSVFLFPPKPKDTLMISRTPEVTCVVVDVSHEDPEVKFNWYVDGVEVHNAKTKPREEQYNSTYRVVSVLTVLHQDWLNGKAYACAVSNKALPAPIEKTISKAKGQPREPQVYTLPPSRDELTKNQVSLTCLVKGFYPSDIAVEWESNGQPENNYKTTPPVLDSDGSFFLYSKLTVDKSRWQQGNVFSCSVMHEALHNHYTQKSLSLSPGQRHNNSSLNTRTQKARHSPNSEVQLLESGGGLVQPGGSLRLSCAASGFTFSWYLMHWVRQAPGKGLEWVSGIWPSGGHTLYADSVKGRFTISRDNSKNTLYLQMNSLRAEDTAVYYCAREPLLWFGELSYNWFDPWGQGTLVTVSSGGGGSGGGGSGGGGSQDIQMTQSPSSVSASVGDRVTITCRASQGISSWLAWYQQKPGKAPKLLIYAASSLQSGVPSRFSGSGSGTDFTLTISSLQPEDFATYYCQQANSFPLTFGGGTKVEIK

SEQ ID NO: 626 - protein, 757 aa, Artificial Sequence
  Made in a lab
MDFQVQIFSFLLISASVIMSRGLPAQVAFTPYAPEPGSTCRLREYYDQTAQMCCSKCSPGQHAKVFCTKTSDTVCDSCEDSTYTQLWNWVPECLSCGSRCSSDQVETQACTREQNRICTCRPGWYCALSKQEGCRLCAPLRKCRPGFGVARPGTETSDVVCKPCAPGTFSNTTSSTDICRPHQICNVVAIPGNASMDAVCTSTSPTRSMAPGAVHLPQPVSTRSQHTQPTPEPSTAPSTSFLLPMGPSPPAEGSTGDTGEPKSSDKTHTCPPCPAPEAAGAPSVFLFPPKPKDTLMISRTPEVTCVVVDVSHEDPEVKFNWYVDGVEVHNAKTKPREEQYNSTYRVVSVLTVLHQDWLNGKAYACAVSNKALPAPIEKTISKAKGQPREPQVYTLPPSRDELTKNQVSLTCLVKGFYPSDIAVEWESNGQPENNYKTTPPVLDSDGSFFLYSKLTVDKSRWQQGNVFSCSVMHEALHNHYTQKSLSLSPGQRHNNSSLNTRTQKARHSPNSEVQLLESGGGLVQPGGSLRLSCAASGFTFSYYENMAWVRQAPGKGLEWVSGIYPSGGLTYYADSVKGRFTISRDNSKNTLYLQMNSLRAEDTAVYYCARSRRYYDSSDAFDIWGQGTMVTVSSGGGGSGGGGSGGGGSQDIQMTQSPATLSLSPGERATLSCRASQSINTYLAWYQQKPGHPPRLLIYDASNRATGIPDRFSGSGSGTDFTLTISRLEPEDFVVYYCQQYGRSRYTFGQGTKLEIK

SEQ ID NO: 627 - protein, 757 aa, Artificial Sequence
  Made in a lab
MDFQVQIFSFLLISASVIMSRGLPAQVAFTPYAPEPGSTCRLREYYDQTAQMCCSKCSPGQHAKVFCTKTSDTVCDSCEDSTYTQLWNWVPECLSCGSRCSSDQVETQACTREQNRICTCRPGWYCALSKQEGCRLCAPLRKCRPGFGVARPGTETSDVVCKPCAPGTFSNTTSSTDICRPHQICNVVAIPGNASMDAVCTSTSPTRSMAPGAVHLPQPVSTRSQHTQPTPEPSTAPSTSFLLPMGPSPPAEGSTGDTGEPKSSDKTHTCPPCPAPEAAGAPSVFLFPPKPKDTLMISRTPEVTCVVVDVSHEDPEVKFNWYVDGVEVHNAKTKPREEQYNSTYRVVSVLTVLHQDWLNGKAYACAVSNKALPAPIEKTISKAKGQPREPQVYTLPPSRDELTKNQVSLTCLVKGFYPSDIAVEWESNGQPENNYKTTPPVLDSDGSFFLYSKLTVDKSRWQQGNVFSCSVMHEALHNHYTQKSLSLSPGQRHNNSSLNTRTQKARHSPNSEVQLLESGGGLVQPGGSLRLSCAASGFTFSTYVMYWVRQAPGKGLEWVSGIGPSGGNTFYADSVKGRFTISRDNSKNTLYLQMNSLRAEDTAVCYCARDPGDFWSGYYGMDVWGQGTTVTVSSGGGGSGGGGSGGGGSQDIQMTQSPSSLSASVGDRVTITCRASQGISNYLAWYQQKPGKVPKLLINAASTLQSGVPSRFSGSGSGTEFTLTISSLQPEDFATYYCQQSDNIPYTFGLGTKLEIK

SEQ ID NO: 628 - protein, 758 aa, Artificial Sequence
  Made in a lab
MDFQVQIFSFLLISASVIMSRGLPAQVAFTPYAPEPGSTCRLREYYDQTAQMCCSKCSPGQHAKVFCTKTSDTVCDSCEDSTYTQLWNWVPECLSCGSRCSSDQVETQACTREQNRICTCRPGWYCALSKQEGCRLCAPLRKCRPGFGVARPGTETSDVVCKPCAPGTFSNTTSSTDICRPHQICNVVAIPGNASMDAVCTSTSPTRSMAPGAVHLPQPVSTRSQHTQPTPEPSTAPSTSFLLPMGPSPPAEGSTGDTGEPKSSDKTHTCPPCPAPEAAGAPSVFLFPPKPKDTLMISRTPEVTCVVVDVSHEDPEVKFNWYVDGVEVHNAKTKPREEQYNSTYRVVSVLTVLHQDWLNGKAYACAVSNKALPAPIEKTISKAKGQPREPQVYTLPPSRDELTKNQVSLTCLVKGFYPSDIAVEWESNGQPENNYKTTPPVLDSDGSFFLYSKLTVDKSRWQQGNVFSCSVMHEALHNHYTQKSLSLSPGQRHNNSSLNTRTQKARHSPNSEVQLLESGGGLVQPGGSLRLSCAASGFTFSFYGMAWVRQAPGKGLEWVSSIYPSGGYTDYADSVKGRFTISRDNSKNTLYLQMNSLRAEDTAVYYCARSAGGWIGGGAFDIWGQGTMVTVSSGGGGSGGGGSGGGGSQSELTQPPSASGTPGQRVTISCSGSSSNIGSNTVNWYQQLPGTAPKLLIYSNNQRPSGVPDRFSGSKSGTSASLAISGLQSEDEADYYCAAWDDSLNGYVFGIGTKVTVL

SEQ ID NO: 629 - protein, 760 aa, Artificial Sequence
  Made in a lab
MDFQVQIFSFLLISASVIMSRGLPAQVAFTPYAPEPGSTCRLREYYDQTAQMCCSKCSPGQHAKVFCTKTSDTVCDSCEDSTYTQLWNWVPECLSCGSRCSSDQVETQACTREQNRICTCRPGWYCALSKQEGCRLCAPLRKCRPGFGVARPGTETSDVVCKPCAPGTFSNTTSSTDICRPHQICNVVAIPGNASMDAVCTSTSPTRSMAPGAVHLPQPVSTRSQHTQPTPEPSTAPSTSFLLPMGPSPPAEGSTGDTGEPKSSDKTHTCPPCPAPEAAGAPSVFLFPPKPKDTLMISRTPEVTCVVVDVSHEDPEVKFNWYVDGVEVHNAKTKPREEQYNSTYRVVSVLTVLHQDWLNGKAYACAVSNKALPAPIEKTISKAKGQPREPQVYTLPPSRDELTKNQVSLTCLVKGFYPSDIAVEWESNGQPENNYKTTPPVLDSDGSFFLYSKLTVDKSRWQQGNVFSCSVMHEALHNHYTQKSLSLSPGQRHNNSSLNTRTQKARHSPNSEVQLLESGGGLVQPGGSLRLSCAASGFTFSKYPMMWVRQAPGKGLEWVSYIYPSGGKTAYADSVKGRFTISRDNSKNTLYLQMNSLRAEDTAVYYCATYGSGSYYLYYYYYYMDVWGKGTTVTVSSGGGGSGGGGSGGGGSQDIQMTQSPSSLSASVGDSVTIACRASQSISTYLNWYQQKPGQAPKLLIYEATNLQSGVPSRFSGSGSGTDFTLTISSLQPEDVATYYCQQANNFPFTFGPGTKVDIK

SEQ ID NO: 630 - protein, 761 aa, Artificial Sequence
  Made in a lab
MDFQVQIFSFLLISASVIMSRGLPAQVAFTPYAPEPGSTCRLREYYDQTAQMCCSKCSPGQHAKVFCTKTSDTVCDSCEDSTYTQLWNWVPECLSCGSRCSSDQVETQACTREQNRICTCRPGWYCALSKQEGCRLCAPLRKCRPGFGVARPGTETSDVVCKPCAPGTFSNTTSSTDICRPHQICNVVAIPGNASMDAVCTSTSPTRSMAPGAVHLPQPVSTRSQHTQPTPEPSTAPSTSFLLPMGPSPPAEGSTGDTGEPKSSDKTHTCPPCPAPEAAGAPSVFLFPPKPKDTLMISRTPEVTCVVVDVSHEDPEVKFNWYVDGVEVHNAKTKPREEQYNSTYRVVSVLTVLHQDWLNGKAYACAVSNKALPAPIEKTISKAKGQPREPQVYTLPPSRDELTKNQVSLTCLVKGFYPSDIAVEWESNGQPENNYKTTPPVLDSDGSFFLYSKLTVDKSRWQQGNVFSCSVMHEALHNHYTQKSLSLSPGQRHNNSSLNTRTQKARHSPNSEVQLLESGGGLVQPGGSLRLSCAASGFTFSWYSMWWVRQAPGKGLEWVSYIVPSGGETIYADSVKGRFTISRDNSKNTLYLQMNSLRAEDTAVYYCAKNLGEGFWSDYYPPLDYWGQGTLVTVSSGGGGSGGGGSGGGGSQSVLTQPPSASGTPGQRVTISCSGSSSNIGGNAVNWYQQLPGTAPKLVLYSSNHRPSGVPDRFSGSRSGTSASLAISGLQSQDEADYYCAAWDDSLNGPLFGGGTKLTVL

SEQ ID NO: 631 - protein, 752 aa, Artificial Sequence
  Made in a lab
MDFQVQIFSFLLISASVIMSRGLPAQVAFTPYAPEPGSTCRLREYYDQTAQMCCSKCSPGQHAKVFCTKTSDTVCDSCEDSTYTQLWNWVPECLSCGSRCSSDQVETQACTREQNRICTCRPGWYCALSKQEGCRLCAPLRKCRPGFGVARPGTETSDVVCKPCAPGTFSNTTSSTDICRPHQICNVVAIPGNASMDAVCTSTSPTRSMAPGAVHLPQPVSTRSQHTQPTPEPSTAPSTSFLLPMGPSPPAEGSTGDTGEPKSSDKTHTCPPCPAPEAAGAPSVFLFPPKPKDTLMISRTPEVTCVVVDVSHEDPEVKFNWYVDGVEVHNAKTKPREEQYNSTYRVVSVLTVLHQDWLNGKAYACAVSNKALPAPIEKTISKAKGQPREPQVYTLPPSRDELTKNQVSLTCLVKGFYPSDIAVEWESNGQPENNYKTTPPVLDSDGSFFLYSKLTVDKSRWQQGNVFSCSVMHEALHNHYTQKSLSLSPGQRHNNSSLNTRTQKARHSPNSEVQLLESGGGLVQPGGSLRLSCAASGFTFSHYGMHWVRQAPGKGLEWVSSIYPGMTQYADSVKGRFTISRDNSKNTLYLQMNSLRAEDTAVYYCARDRGSGIDAFDIWGQGTMVTVSSGGGGSGGGGSGGGGSQSELTQPPSVSVSPGQTATVSCSGEKLGDRYAWWYQQKAGQSPVLVIYQDTKRPSGVPDRFSGSNSGTSASLVISGPQSEDEADYYCAAWDDSLKGVVFGGGSKLTVL

SEQ ID NO: 632 - protein, 761 aa, Artificial Sequence
  Made in a lab
MDFQVQIFSFLLISASVIMSRGLPAQVAFTPYAPEPGSTCRLREYYDQTAQMCCSKCSPGQHAKVFCTKTSDTVCDSCEDSTYTQLWNWVPECLSCGSRCSSDQVETQACTREQNRICTCRPGWYCALSKQEGCRLCAPLRKCRPGFGVARPGTETSDVVCKPCAPGTFSNTTSSTDICRPHQICNVVAIPGNASMDAVCTSTSPTRSMAPGAVHLPQPVSTRSQHTQPTPEPSTAPSTSFLLPMGPSPPAEGSTGDTGEPKSSDKTHTCPPCPAPEAAGAPSVFLFPPKPKDTLMISRTPEVTCVVVDVSHEDPEVKFNWYVDGVEVHNAKTKPREEQYNSTYRVVSVLTVLHQDWLNGKAYACAVSNKALPAPIEKTISKAKGQPREPQVYTLPPSRDELTKNQVSLTCLVKGFYPSDIAVEWESNGQPENNYKTTPPVLDSDGSFFLYSKLTVDKSRWQQGNVFSCSVMHEALHNHYTQKSLSLSPGQRHNNSSLNTRTQKARHSPNSEVQLLESGGGLVQPGGSLRLSCAASGFTFSWYDMLWVRQAPGKGLEWVSVISPSGGRTFYADSVKGRFTISRDNSKNTLYLQMNSLRAEDTAVYYCAVTRSMYSSSWYGAPPTHWGQGTLVTVSSGGGGSGGGGSGGGGSQSELTQPPSASGTPGQRVTISCSGRSSNIGSNSVNWYQQLPGTAPKLLIYSNNHRPSGVPDRFSGSKSGTSASLAISGLQSEDEADYYCAAWDDSLYQGVFGGGTKLTVL

SEQ ID NO: 633 - protein, 754 aa, Artificial Sequence
  Made in a lab
MDFQVQIFSFLLISASVIMSRGLPAQVAFTPYAPEPGSTCRLREYYDQTAQMCCSKCSPGQHAKVFCTKTSDTVCDSCEDSTYTQLWNWVPECLSCGSRCSSDQVETQACTREQNRICTCRPGWYCALSKQEGCRLCAPLRKCRPGFGVARPGTETSDVVCKPCAPGTFSNTTSSTDICRPHQICNVVAIPGNASMDAVCTSTSPTRSMAPGAVHLPQPVSTRSQHTQPTPEPSTAPSTSFLLPMGPSPPAEGSTGDTGEPKSSDKTHTCPPCPAPEAAGAPSVFLFPPKPKDTLMISRTPEVTCVVVDVSHEDPEVKFNWYVDGVEVHNAKTKPREEQYNSTYRVVSVLTVLHQDWLNGKAYACAVSNKALPAPIEKTISKAKGQPREPQVYTLPPSRDELTKNQVSLTCLVKGFYPSDIAVEWESNGQPENNYKTTPPVLDSDGSFFLYSKLTVDKSRWQQGNVFSCSVMHEALHNHYTQKSLSLSPGQRHNNSSLNTRTQKARHSPNSEVQLLESGGGLVQPGGSLRLSCAASGFTFSWYKMHWVRQAPGKGLEWVSGISSSGGLTKYADSVKGRFTISRDNSKNTLYLQMNSLRAEDTAVYYCTTERRGDGGAFDIWGQGTMVTVSSGGGGSGGGGSGGGGSQDIQMTQSPSSLSASVGDRVTITCRASQSISSYLNWYQQKPGKAPKLLIYAASSLQSGVPSKFSGSGSGTDFTLTISSLLPEDFATYYCQQYEYFPPTFGQGTKVEIK

SEQ ID NO: 634 - protein, 757 aa, Artificial Sequence [sequence omitted]

SEQ ID NO: 635 - protein, 749 aa, Artificial Sequence
  Made in a lab
MDFQVQIFSFLLISASVIMSRGLPAQVAFTPYAPEPGSTCRLREYYDQTAQMCCSKCSPGQHAKVFCTKTSDTVCDSCEDSTYTQLWNWVPECLSCGSRCSSDQVETQACTREQNRICTCRPGWYCALSKQEGCRLCAPLRKCRPGFGVARPGTETSDVVCKPCAPGTFSNTTSSTDICRPHQICNVVAIPGNASMDAVCTSTSPTRSMAPGAVHLPQPVSTRSQHTQPTPEPSTAPSTSFLLPMGPSPPAEGSTGDTGEPKSSDKTHTCPPCPAPEAAGAPSVFLFPPKPKDTLMISRTPEVTCVVVDVSHEDPEVKFNWYVDGVEVHNAKTKPREEQYNSTYRVVSVLTVLHQDWLNGKAYACAVSNKALPAPIEKTISKAKGQPREPQVYTLPPSRDELTKNQVSLTCLVKGFYPSDIAVEWESNGQPENNYKTTPPVLDSDGSFFLYSKLTVDKSRWQQGNVFSCSVMHEALHNHYTQKSLSLSPGQRHNNSSLNTRTQKARHSPNSEVQLLESGGGLVQPGGSLRLSCAASGFTFSSYWMHWVRQAPGKGLEWVSSIYPSGGSTEYADSVKGRFTISRDNSKNTLYLQMNSLRAEDTAVYYCAKGIWFDPWGQGTLVTVSSGGGGSGGGGSGGGGSQDIQMTQSPATLSASVGDRVTITCRSSQRISGYLNWYQQQPGKAPKLLIYAASTLQSGVPSRISGSGSGTDFSLIISSLQPEDVATYYCQQSYSPPFTFGQGTKVEIK

SEQ ID NO: 636 - protein, 755 aa, Artificial Sequence
  Made in a lab
MDFQVQIFSFLLISASVIMSRGLPAQVAFTPYAPEPGSTCRLREYYDQTAQMCCSKCSPGQHAKVFCTKTSDTVCDSCEDSTYTQLWNWVPECLSCGSRCSSDQVETQACTREQNRICTCRPGWYCALSKQEGCRLCAPLRKCRPGFGVARPGTETSDVVCKPCAPGTFSNTTSSTDICRPHQICNVVAIPGNASMDAVCTSTSPTRSMAPGAVHLPQPVSTRSQHTQPTPEPSTAPSTSFLLPMGPSPPAEGSTGDTGEPKSSDKTHTCPPCPAPEAAGAPSVFLFPPKPKDTLMISRTPEVTCVVVDVSHEDPEVKFNWYVDGVEVHNAKTKPREEQYNSTYRVVSVLTVLHQDWLNGKAYACAVSNKALPAPIEKTISKAKGQPREPQVYTLPPSRDELTKNQVSLTCLVKGFYPSDIAVEWESNGQPENNYKTTPPVLDSDGSFFLYSKLTVDKSRWQQGNVFSCSVMHEALHNHYTQKSLSLSPGQRHNNSSLNTRTQKARHSPNSEVQLLESGGGLVQPGGPLRLSCAASGFTFSRYGMMWVRQAPGKGLEWVSYISSSGGFTRYADSVKGRFTISRDNSKNTLYLQMNSLRAEDTAVYYCARVGGYSYGPHFDFWGQGTLVTVSSGGGGSGGGGSGGGGSQDIQMTQSPSTLSASVGDRVTITCRASQSISTWLAWFQQKPGKAPKLLIYKASSLQSGVPSRFSGSGSGTDFTLTISSLQPEDFATYYCQQYKSYPFTFGGGTKVEIK

SEQ ID NO: 637 - protein, 757 aa, Artificial Sequence
  Made in a lab
MDFQVQIFSFLLISASVIMSRGLPAQVAFTPYAPEPGSTCRLREYYDQTAQMCCSKCSPGQHAKVFCTKTSDTVCDSCEDSTYTQLWNWVPECLSCGSRCSSDQVETQACTREQNRICTCRPGWYCALSKQEGCRLCAPLRKCRPGFGVARPGTETSDVVCKPCAPGTFSNTTSSTDICRPHQICNVVAIPGNASMDAVCTSTSPTRSMAPGAVHLPQPVSTRSQHTQPTPEPSTAPSTSFLLPMGPSPPAEGSTGDTGEPKSSDKTHTCPPCPAPEAAGAPSVFLFPPKPKDTLMISRTPEVTCVVVDVSHEDPEVKFNWYVDGVEVHNAKTKPREEQYNSTYRVVSVLTVLHQDWLNGKAYACAVSNKALPAPIEKTISKAKGQPREPQVYTLPPSRDELTKNQVSLTCLVKGFYPSDIAVEWESNGQPENNYKTTPPVLDSDGSFFLYSKLTVDKSRWQQGNVFSCSVMHEALHNHYTQKSLSLSPGQRHNNSSLNTRTQKARHSPNSEVQLLESGGGLVQPGGSLRLSCAASGFTFSWYHMIWVRQAPGKGLEWVSWISPSGGFTKYADSVKGRFTISRDNSKNTLYLQMNSLRAEDTAVYYCARYDSRAAAGTNAFDIWGQGTMVTVSSGGGGSGGGGSGGGGSQDIQMTQSPSSLSASVGDSVTITCQASQDIRSYLNWFQQKPGKAPKLLIYDTVNLQTGVPSRFSGSGSGTDYSFTINNLQPEDFATYCCQQYEYLPITFGQGTRLEIK

SEQ ID NO: 638 - protein, 757 aa, Artificial Sequence [sequence omitted]

SEQ ID NO: 639 - protein, 752 aa, Artificial Sequence
  Made in a lab
MDFQVQIFSFLLISASVIMSRGLPAQVAFTPYAPEPGSTCRLREYYDQTAQMCCSKCSPGQHAKVFCTKTSDTVCDSCEDSTYTQLWNWVPECLSCGSRCSSDQVETQACTREQNRICTCRPGWYCALSKQEGCRLCAPLRKCRPGFGVARPGTETSDVVCKPCAPGTFSNTTSSTDICRPHQICNVVAIPGNASMDAVCTSTSPTRSMAPGAVHLPQPVSTRSQHTQPTPEPSTAPSTSFLLPMGPSPPAEGSTGDTGEPKSSDKTHTCPPCPAPEAAGAPSVFLFPPKPKDTLMISRTPEVTCVVVDVSHEDPEVKFNWYVDGVEVHNAKTKPREEQYNSTYRVVSVLTVLHQDWLNGKAYACAVSNKALPAPIEKTISKAKGQPREPQVYTLPPSRDELTKNQVSLTCLVKGFYPSDIAVEWESNGQPENNYKTTPPVLDSDGSFFLYSKLTVDKSRWQQGNVFSCSVMHEALHNHYTQKSLSLSPGQRHNNSSLNTRTQKARHSPNSEVQLLESGGGLVQPGGSLRLSCAASGFTFSNYWMYWVRQAPGKGLEWVSVISSSGGHTFYADSVKGRFTISRDNSKNTLYLQMNSLRAEDTAVYYCARDYEGGSNDYWGQGTLVTVSSGGGGSGGGGSGGGGSQDIQMTQSPSSLSASVGDRVTITCRASQSISSYLNWYQQKPGKAPKLLIYAASSLQSGVPSRFSGSGSGTDFTLTISSLQPEDFATYYCQQSYSTPVTFGGGTKVEIK

SEQ ID NO: 640 - protein, 755 aa, Artificial Sequence [sequence omitted]

SEQ ID NO: 641 - protein, 756 aa, Artificial Sequence
  Made in a lab
MDFQVQIFSFLLISASVIMSRGLPAQVAFTPYAPEPGSTCRLREYYDQTAQMCCSKCSPGQHAKVFCTKTSDTVCDSCEDSTYTQLWNWVPECLSCGSRCSSDQVETQACTREQNRICTCRPGWYCALSKQEGCRLCAPLRKCRPGFGVARPGTETSDVVCKPCAPGTFSNTTSSTDICRPHQICNVVAIPGNASMDAVCTSTSPTRSMAPGAVHLPQPVSTRSQHTQPTPEPSTAPSTSFLLPMGPSPPAEGSTGDTGEPKSSDKTHTCPPCPAPEAAGAPSVFLFPPKPKDTLMISRTPEVTCVVVDVSHEDPEVKFNWYVDGVEVHNAKTKPREEQYNSTYRVVSVLTVLHQDWLNGKAYACAVSNKALPAPIEKTISKAKGQPREPQVYTLPPSRDELTKNQVSLTCLVKGFYPSDIAVEWESNGQPENNYKTTPPVLDSDGSFFLYSKLTVDKSRWQQGNVFSCSVMHEALHNHYTQKSLSLSPGQRHNNSSLNTRTQKARHSPNSEVQLLESGGGLVQPGGSLRLSCAASGFTFSFYTMWWVRQAPGKGLEWVSSIYPSGGQTLYADSVKGRFTISRDNSKNTLYLQMNSLRAEDTAVYYCARPDSYGYLYYGMDVWGQGTTVTVSSGGGGSGGGGSGGGGSQDIQMTQSPSSLSASVGDRVTITCRASQSIGTYLNWYQQKPGKAPNLLIYGTSSLQRGVPSRFSGSGSGTDFTLTISTLQPEDFVHYYCQQSYTSPPTFGQGTKVEVK

SEQ ID NO: 642 - protein, 747 aa, Artificial Sequence
  Made in a lab
MDFQVQIFSFLLISASVIMSRGLPAQVAFTPYAPEPGSTCRLREYYDQTAQMCCSKCSPGQHAKVFCTKTSDTVCDSCEDSTYTQLWNWVPECLSCGSRCSSDQVETQACTREQNRICTCRPGWYCALSKQEGCRLCAPLRKCRPGFGVARPGTETSDVVCKPCAPGTFSNTTSSTDICRPHQICNVVAIPGNASMDAVCTSTSPTRSMAPGAVHLPQPVSTRSQHTQPTPEPSTAPSTSFLLPMGPSPPAEGSTGDTGEPKSSDKTHTCPPCPAPEAAGAPSVFLFPPKPKDTLMISRTPEVTCVVVDVSHEDPEVKFNWYVDGVEVHNAKTKPREEQYNSTYRVVSVLTVLHQDWLNGKAYACAVSNKALPAPIEKTISKAKGQPREPQVYTLPPSRDELTKNQVSLTCLVKGFYPSDIAVEWESNGQPENNYKTTPPVLDSDGSFFLYSKLTVDKSRWQQGNVFSCSVMHEALHNHYTQKSLSLSPGQRHNNSSLNTRTQKARHSPNSEVQLLESGGGLVQPGGSLRLSCAASGFTFSWYPMEWVRQAPGKGLEWVSGIGPSGGQTTYADSVKGRFTISRDNSKNTLYLQMNSLRAEDTAVYYCARGSYSFIWGQGTMVTVSSGGGGSGGGGSGGGGSQYELTQSPSVSVSPGQTASIPCSGDQLGGKFTSWYQQKAGQSPLLVIYQDTKRPSGIPERFSGSNSGNTATLTITGTQAMDEADYYCLVWDSNTYVFGPGTKVTVL

SEQ ID NO: 643 - protein, 759 aa, Artificial Sequence
  Made in a lab
MDFQVQIFSFLLISASVIMSRGLPAQVAFTPYAPEPGSTCRLREYYDQTAQMCCSKCSPGQHAKVFCTKTSDTVCDSCEDSTYTQLWNWVPECLSCGSRCSSDQVETQACTREQNRICTCRPGWYCALSKQEGCRLCAPLRKCRPGFGVARPGTETSDVVCKPCAPGTFSNTTSSTDICRPHQICNVVAIPGNASMDAVCTSTSPTRSMAPGAVHLPQPVSTRSQHTQPTPEPSTAPSTSFLLPMGPSPPAEGSTGDTGEPKSSDKTHTCPPCPAPEAAGAPSVFLFPPKPKDTLMISRTPEVTCVVVDVSHEDPEVKFNWYVDGVEVHNAKTKPREEQYNSTYRVVSVLTVLHQDWLNGKAYACAVSNKALPAPIEKTISKAKGQPREPQVYTLPPSRDELTKNQVSLTCLVKGFYPSDIAVEWESNGQPENNYKTTPPVLDSDGSFFLYSKLTVDKSRWQQGNVFSCSVMHEALHNHYTQKSLSLSPGQRHNNSSLNTRTQKARHSPNSEVQLLESGGGLVQPGGSLRLSCAASGFTFSLYKMAWVRQAPGKGLEWVSVIGSSGGRTPYADSVKGRFTISRDNSKNTLYLQMNSLRAEDTAVYYCARAPLSGWFGQAHDAFDIWGQGTMVTVSSGGGGSGGGGSGGGGSQYELTQSPSVSVAPGQTARITCGGNNIGSKSVHWYQQKPGQAPVLVVYDDSDRPSGIPERFSGSNSGNTATLTVSRVEAGDEADYYCQVWDSSGGLQVFGTGTKVTVL

SEQ ID NO: 644 - protein, 756 aa, Artificial Sequence [sequence omitted]

SEQ ID NO: 645 - protein, 751 aa, Artificial Sequence
  Made in a lab
MDFQVQIFSFLLISASVIMSRGLPAQVAFTPYAPEPGSTCRLREYYDQTAQMCCSKCSPGQHAKVFCTKTSDTVCDSCEDSTYTQLWNWVPECLSCGSRCSSDQVETQACTREQNRICTCRPGWYCALSKQEGCRLCAPLRKCRPGFGVARPGTETSDVVCKPCAPGTFSNTTSSTDICRPHQICNVVAIPGNASMDAVCTSTSPTRSMAPGAVHLPQPVSTRSQHTQPTPEPSTAPSTSFLLPMGPSPPAEGSTGDTGEPKSSDKTHTCPPCPAPEAAGAPSVFLFPPKPKDTLMISRTPEVTCVVVDVSHEDPEVKFNWYVDGVEVHNAKTKPREEQYNSTYRVVSVLTVLHQDWLNGKAYACAVSNKALPAPIEKTISKAKGQPREPQVYTLPPSRDELTKNQVSLTCLVKGFYPSDIAVEWESNGQPENNYKTTPPVLDSDGSFFLYSKLTVDKSRWQQGNVFSCSVMHEALHNHYTQKSLSLSPGQRHNNSSLNTRTQKARHSPNSEVQLLESGGGLVQPGGSLRLSCAASGFTFSVYPMHWVRQAPGKGLEWVSSIYSSGGFTMYADSVKGRFTISRDNSKNTLYLQMNSLRAEDTAVYYCVREGVADAFDIWGQGTMVTVSSGGGGSGGGGSGGGGSQDIQMTQSPSTLSASVGDRVTITCRASQSISSWLAWYQQKPGKAPKLLIYKASSLESGVPSRFSGSGSGTEFTLTISSLQPDDFATYHCQQYKSYWTFGQGTKVEIK

SEQ ID NO: 646 - protein, 756 aa, Artificial Sequence
  Made in a lab
MDFQVQIFSFLLISASVIMSRGLPAQVAFTPYAPEPGSTCRLREYYDQTAQMCCSKCSPGQHAKVFCTKTSDTVCDSCEDSTYTQLWNWVPECLSCGSRCSSDQVETQACTREQNRICTCRPGWYCALSKQEGCRLCAPLRKCRPGFGVARPGTETSDVVCKPCAPGTFSNTTSSTDICRPHQICNVVAIPGNASMDAVCTSTSPTRSMAPGAVHLPQPVSTRSQHTQPTPEPSTAPSTSFLLPMGPSPPAEGSTGDTGEPKSSDKTHTCPPCPAPEAAGAPSVFLFPPKPKDTLMISRTPEVTCVVVDVSHEDPEVKFNWYVDGVEVHNAKTKPREEQYNSTYRVVSVLTVLHQDWLNGKAYACAVSNKALPAPIEKTISKAKGQPREPQVYTLPPSRDELTKNQVSLTCLVKGFYPSDIAVEWESNGQPENNYKTTPPVLDSDGSFFLYSKLTVDKSRWQQGNVFSCSVMHEALHNHYTQKSLSLSPGQRHNNSSLNTRTQKARHSPNSEVQLLESGGGLVQPGGSLRLSCAASGFTFSSYTMHWVRQAPGKGLEWVSSISPSGGMTFYADSVKGRFTISRDNSKNTLYLQMNSLRAEDTAVYYCARTYDFWSGYFDYWGQGTLVTVSSGGGGSGGGGSGGGGSQSELTQPPSVSEAPRQRVTVSCSGSPSNIGSNSVNWYQQLPGKAPKVVIYYDDLVPSGVSDRFSGSKSGTSASLAISGLQSEDEADYYCAAWDDRLNGWVFGGGTKLTVL

SEQ ID NO: 647 - protein, 759 aa, Artificial Sequence [sequence omitted]

SEQ ID NO: 648 - protein, 754 aa, Artificial Sequence
  Made in a lab
MDFQVQIFSFLLISASVIMSRGLPAQVAFTPYAPEPGSTCRLREYYDQTAQMCCSKCSPGQHAKVFCTKTSDTVCDSCEDSTYTQLWNWVPECLSCGSRCSSDQVETQACTREQNRICTCRPGWYCALSKQEGCRLCAPLRKCRPGFGVARPGTETSDVVCKPCAPGTFSNTTSSTDICRPHQICNVVAIPGNASMDAVCTSTSPTRSMAPGAVHLPQPVSTRSQHTQPTPEPSTAPSTSFLLPMGPSPPAEGSTGDTGEPKSSDKTHTCPPCPAPEAAGAPSVFLFPPKPKDTLMISRTPEVTCVVVDVSHEDPEVKFNWYVDGVEVHNAKTKPREEQYNSTYRVVSVLTVLHQDWLNGKAYACAVSNKALPAPIEKTISKAKGQPREPQVYTLPPSRDELTKNQVSLTCLVKGFYPSDIAVEWESNGQPENNYKTTPPVLDSDGSFFLYSKLTVDKSRWQQGNVFSCSVMHEALHNHYTQKSLSLSPGQRHNNSSLNTRTQKARHSPNSEVQLLESGGGLVQPGGSLRLSCAASGFTFSNYNMYWVRQAPGKGLEWVSYISPSGGMTKYADSVKGRFTISRDNSKNTLYLQMNSLRAEDTAVYYCARRGVLGYYGMDVWGQGTMVTVSSGGGGSGGGGSGGGGSQDIQMTQSPSSLSASVGDRVTITCRASQSISSYLNWYQQKPGKAPKLLIYAASSLQSGVPSRFSGSGSGTDFTLTISSLQPEDFATYYCQQSYSTPYTFGQGTKLEIK

SEQ ID NO: 649 - protein, 757 aa, Artificial Sequence
  Made in a lab
MDFQVQIFSFLLISASVIMSRGLPAQVAFTPYAPEPGSTCRLREYYDQTAQMCCSKCSPGQHAKVFCTKTSDTVCDSCEDSTYTQLWNWVPECLSCGSRCSSDQVETQACTREQNRICTCRPGWYCALSKQEGCRLCAPLRKCRPGFGVARPGTETSDVVCKPCAPGTFSNTTSSTDICRPHQICNVVAIPGNASMDAVCTSTSPTRSMAPGAVHLPQPVSTRSQHTQPTPEPSTAPSTSFLLPMGPSPPAEGSTGDTGEPKSSDKTHTCPPCPAPEAAGAPSVFLFPPKPKDTLMISRTPEVTCVVVDVSHEDPEVKFNWYVDGVEVHNAKTKPREEQYNSTYRVVSVLTVLHQDWLNGKAYACAVSNKALPAPIEKTISKAKGQPREPQVYTLPPSRDELTKNQVSLTCLVKGFYPSDIAVEWESNGQPENNYKTTPPVLDSDGSFFLYSKLTVDKSRWQQGNVFSCSVMHEALHNHYTQKSLSLSPGQRHNNSSLNTRTQKARHSPNSEVQLLESGGGLVQPGGSLRLSCAASGFTFSLYSMNWVRQAPGKGLEWVSSISSSGGATLYADSVKGRFTISRDNSKNTLYLQMNSLRAEDTAVYYCARDLISSGYYPDAFDIWGQGTMVTVSSGGGGSGGGGSGGGGSQDIQMTQSPGTLSLSPGERATLSCRASQSVSSSYLAWYQQKPGQAPRLLIYGASNRVTGIPDRFSGSGSGTDFTLTISRLEPEDSAVYYCHQYGSQYTFGPGTKLEIK

SEQ ID NO: 650 - protein, 762 aa, Artificial Sequence [sequence omitted]

SEQ ID NO: 651 - protein, 755 aa, Artificial Sequence
  Made in a lab
MDFQVQIFSFLLISASVIMSRGLPAQVAFTPYAPEPGSTCRLREYYDQTAQMCCSKCSPGQHAKVFCTKTSDTVCDSCEDSTYTQLWNWVPECLSCGSRCSSDQVETQACTREQNRICTCRPGWYCALSKQEGCRLCAPLRKCRPGFGVARPGTETSDVVCKPCAPGTFSNTTSSTDICRPHQICNVVAIPGNASMDAVCTSTSPTRSMAPGAVHLPQPVSTRSQHTQPTPEPSTAPSTSFLLPMGPSPPAEGSTGDTGEPKSSDKTHTCPPCPAPEAAGAPSVFLFPPKPKDTLMISRTPEVTCVVVDVSHEDPEVKFNWYVDGVEVHNAKTKPREEQYNSTYRVVSVLTVLHQDWLNGKAYACAVSNKALPAPIEKTISKAKGQPREPQVYTLPPSRDELTKNQVSLTCLVKGFYPSDIAVEWESNGQPENNYKTTPPVLDSDGSFFLYSKLTVDKSRWQQGNVFSCSVMHEALHNHYTQKSLSLSPGQRHNNSSLNTRTQKARHSPNSEVQLLESGGGLVQPGGSLRLSCAASGFTFSWYSMIWVRQAPGKGLEWVSSIVPSGGLTWYADSVKGRFTISRDNSKNTLYLQMNSLRAEDTAVYYCARDVYGDYYFDNWGQGTLVTVSSGGGGSGGGGSGGGGSQSELTQPPSVSEAPGQRVTISCSGSTSNIGNNAVIWYQQLPGKAPKLLIYYDDLLPSGVSDRFSGSKSGTSGSLAISGLQSEDEADYYCASWDDNLNGPLFGGGTKLTVL

SEQ ID NO: 652 - protein, 753 aa, Artificial Sequence [sequence omitted]

SEQ ID NO: 653 - protein, 754 aa, Artificial Sequence [sequence omitted]

SEQ ID NO: 654 - protein, 759 aa, Artificial Sequence [sequence omitted]

SEQ ID NO: 655 - protein, 753 aa, Artificial Sequence
  Made in a lab
MDFQVQIFSFLLISASVIMSRGLPAQVAFTPYAPEPGSTCRLREYYDQTAQMCCSKCSPGQHAKVFCTKTSDTVCDSCEDSTYTQLWNWVPECLSCGSRCSSDQVETQACTREQNRICTCRPGWYCALSKQEGCRLCAPLRKCRPGFGVARPGTETSDVVCKPCAPGTFSNTTSSTDICRPHQICNVVAIPGNASMDAVCTSTSPTRSMAPGAVHLPQPVSTRSQHTQPTPEPSTAPSTSFLLPMGPSPPAEGSTGDTGEPKSSDKTHTCPPCPAPEAAGAPSVFLFPPKPKDTLMISRTPEVTCVVVDVSHEDPEVKFNWYVDGVEVHNAKTKPREEQYNSTYRVVSVLTVLHQDWLNGKAYACAVSNKALPAPIEKTISKAKGQPREPQVYTLPPSRDELTKNQVSLTCLVKGFYPSDIAVEWESNGQPENNYKTTPPVLDSDGSFFLYSKLTVDKSRWQQGNVFSCSVMHEALHNHYTQKSLSLSPGQRHNNSSLNTRTQKARHSPNSEVQLLESGGGLVQPGGSLRLSCAASGFTFSSYFMGWVRQAPGKGLEWVSSIWPSGGNTTYADSVKGRFTISRDNSKNTLYLQMNSLRAEDTAVYYCARHVGWGRYFDYWGQGTLVTVSSGGGGSGGGGSGGGGSQDIQMTQSPSSLSASVGDRVTITCRASQNIYHYLHWYQQKPGKAPKLLIYAASTLESGVPSRFSGSGSGTDLTLTINSLQPEDFATYYCQQTYDTPLTFGGGSKVEVK

SEQ ID NO: 656 - protein, 757 aa, Artificial Sequence
  Made in a lab
MDFQVQIFSFLLISASVIMSRGLPAQVAFTPYAPEPGSTCRLREYYDQTAQMCCSKCSPGQHAKVFCTKTSDTVCDSCEDSTYTQLWNWVPECLSCGSRCSSDQVETQACTREQNRICTCRPGWYCALSKQEGCRLCAPLRKCRPGFGVARPGTETSDVVCKPCAPGTFSNTTSSTDICRPHQICNVVAIPGNASMDAVCTSTSPTRSMAPGAVHLPQPVSTRSQHTQPTPEPSTAPSTSFLLPMGPSPPAEGSTGDTGEPKSSDKTHTCPPCPAPEAAGAPSVFLFPPKPKDTLMISRTPEVTCVVVDVSHEDPEVKFNWYVDGVEVHNAKTKPREEQYNSTYRVVSVLTVLHQDWLNGKAYACAVSNKALPAPIEKTISKAKGQPREPQVYTLPPSRDELTKNQVSLTCLVKGFYPSDIAVEWESNGQPENNYKTTPPVLDSDGSFFLYSKLTVDKSRWQQGNVFSCSVMHEALHNHYTQKSLSLSPGQRHNNSSLNTRTQKARHSPNSEVQLLESGGGLVQPGGSLRLSCAASGFTFSAYRMIWVRQAPGKGLEWVSYISSSGGRTDYADSVKGRFTISRDNSKNTLYLQMNSLRAEDTAVYYCTTGGLRYFDWLAPSMDYWGQGTLVTVSSGGGGSGGGGSGGGGSQSALTQPPSVSVSPGQTASITCSGDKLGEKFASWYQQRPGQSPILVIYQDSKRPSGIPERFSGSNSGNTATLTISGTQTMDEADYYCQAWGGSTAYVFGSGTKVTVL

SEQ ID NO: 657 - protein, 752 aa, Artificial Sequence [sequence omitted]

SEQ ID NO: 658 - protein, 754 aa, Artificial Sequence [sequence omitted]

SEQ ID NO: 659 - protein, 754 aa, Artificial Sequence
  Made in a lab
MDFQVQIFSFLLISASVIMSRGLPAQVAFTPYAPEPGSTCRLREYYDQTAQMCCSKCSPGQHAKVFCTKTSDTVCDSCEDSTYTQLWNWVPECLSCGSRCSSDQVETQACTREQNRICTCRPGWYCALSKQEGCRLCAPLRKCRPGFGVARPGTETSDVVCKPCAPGTFSNTTSSTDICRPHQICNVVAIPGNASMDAVCTSTSPTRSMAPGAVHLPQPVSTRSQHTQPTPEPSTAPSTSFLLPMGPSPPAEGSTGDTGEPKSSDKTHTCPPCPAPEAAGAPSVFLFPPKPKDTLMISRTPEVTCVVVDVSHEDPEVKFNWYVDGVEVHNAKTKPREEQYNSTYRVVSVLTVLHQDWLNGKAYACAVSNKALPAPIEKTISKAKGQPREPQVYTLPPSRDELTKNQVSLTCLVKGFYPSDIAVEWESNGQPENNYKTTPPVLDSDGSFFLYSKLTVDKSRWQQGNVFSCSVMHEALHNHYTQKSLSLSPGQRHNNSSLNTRTQKARHSPNSEVQLLESGGGLVQPGGSSRLSCAASGFTFSLYNMQWVRQAPGKGLEWVSGISLSGGKTFYADSVKGRFTISRDNSKNTLYLQMNSLRAEDTAVYYCARDYGVATLDAFDIWGQGTMVTVSSGGGGSGGGGSGGGGSQSELTQTPSVSVSPGQTASITCSGNRLEDKYVHWYQQKPGQSPVLVLYQDNKRPSGIPERFSGSNSGNTATLTISETQTLDEADYYCQAWDSSTREVFGGGTKLTVL

SEQ ID NO: 660 - protein, 761 aa, Artificial Sequence [sequence omitted]

SEQ ID NO: 661 - protein, 757 aa, Artificial Sequence [sequence omitted]

SEQ ID NO: 662 - protein, 755 aa, Artificial Sequence [sequence omitted]

SEQ ID NO: 663 - protein, 755 aa, Artificial Sequence
  Made in a lab
MDFQVQIFSFLLISASVIMSRGLPAQVAFTPYAPEPGSTCRLREYYDQTAQMCCSKCSPGQHAKVFCTKTSDTVCDSCEDSTYTQLWNWVPECLSCGSRCSSDQVETQACTREQNRICTCRPGWYCALSKQEGCRLCAPLRKCRPGFGVARPGTETSDVVCKPCAPGTFSNTTSSTDICRPHQICNVVAIPGNASMDAVCTSTSPTRSMAPGAVHLPQPVSTRSQHTQPTPEPSTAPSTSFLLPMGPSPPAEGSTGDTGEPKSSDKTHTCPPCPAPEAAGAPSVFLFPPKPKDTLMISRTPEVTCVVVDVSHEDPEVKFNWYVDGVEVHNAKTKPREEQYNSTYRVVSVLTVLHQDWLNGKAYACAVSNKALPAPIEKTISKAKGQPREPQVYTLPPSRDELTKNQVSLTCLVKGFYPSDIAVEWESNGQPENNYKTTPPVLDSDGSFFLYSKLTVDKSRWQQGNVFSCSVMHEALHNHYTQKSLSLSPGQRHNNSSLNTRTQKARHSPNSEVQLLESGGGLVQPGGSLRLSCAASGFTFSKYDMWWVRQAPGKGLEWVSSIWPSGGWTSYADSVKGRFTISRDNSKNTLYLQMNSLRAEDTAVYYCAKSRGSPWYGDFDHWGQGTLVTVSSGGGGSGGGGSGGGGSQSELTQPPSVSVAPGETATVTCGGINIGSKSVHWYQQKPDQAPVVVMYFDSDRPSGIPERFSGSNSGDTATLTISRVEAGDEADYYCQVWDSRSDQYVFGFGTKVTVL

SEQ ID NO: 664 - protein, 752 aa, Artificial Sequence
  Made in a lab
MDFQVQIFSFLLISASVIMSRGLPAQVAFTPYAPEPGSTCRLREYYDQTAQMCCSKCSPGQHAKVFCTKTSDTVCDSCEDSTYTQLWNWVPECLSCGSRCSSDQVETQACTREQNRICTCRPGWYCALSKQEGCRLCAPLRKCRPGFGVARPGTETSDVVCKPCAPGTFSNTTSSTDICRPHQICNVVAIPGNASMDAVCTSTSPTRSMAPGAVHLPQPVSTRSQHTQPTPEPSTAPSTSFLLPMGPSPPAEGSTGDTGEPKSSDKTHTCPPCPAPEAAGAPSVFLFPPKPKDTLMISRTPEVTCVVVDVSHEDPEVKFNWYVDGVEVHNAKTKPREEQYNSTYRVVSVLTVLHQDWLNGKAYACAVSNKALPAPIEKTISKAKGQPREPQVYTLPPSRDELTKNQVSLTCLVKGFYPSDIAVEWESNGQPENNYKTTPPVLDSDGSFFLYSKLTVDKSRWQQGNVFSCSVMHEALHNHYTQKSLSLSPGQRHNNSSLNTRTQKARHSPNSEVQLLESGGGLVQPGGSLRLSCAASGFTFSMYTMHWVRQAPGKGLEWVSWISPSGGWTKYADSVKGRFTISRDNSKNTLYLQMNSLRAEDTAVYYCAVSPWGGPFDYWGQGTLVTVSSGGGGSGGGGSGGGGSQDIQMTQSPSTLSASVGDRVTITCRASQSISSWLAWYQQKPGKAPKLLIYKASTLESGVPSRFSAGGSGTEFTLTISSLQPDDFGTYYCQQYNSYSLTFGGGTKVEII

SEQ ID NO: 665 - protein, 757 aa, Artificial Sequence
  Made in a lab
MDFQVQIFSFLLISASVIMSRGLPAQVAFTPYAPEPGSTCRLREYYDQTAQMCCSKCSPGQHAKVFCTKTSDTVCDSCEDSTYTQLWNWVPECLSCGSRCSSDQVETQACTREQNRICTCRPGWYCALSKQEGCRLCAPLRKCRPGFGVARPGTETSDVVCKPCAPGTFSNTTSSTDICRPHQICNVVAIPGNASMDAVCTSTSPTRSMAPGAVHLPQPVSTRSQHTQPTPEPSTAPSTSFLLPMGPSPPAEGSTGDTGEPKSSDKTHTCPPCPAPEAAGAPSVFLFPPKPKDTLMISRTPEVTCVVVDVSHEDPEVKFNWYVDGVEVHNAKTKPREEQYNSTYRVVSVLTVLHQDWLNGKAYACAVSNKALPAPIEKTISKAKGQPREPQVYTLPPSRDELTKNQVSLTCLVKGFYPSDIAVEWESNGQPENNYKTTPPVLDSDGSFFLYSKLTVDKSRWQQGNVFSCSVMHEALHNHYTQKSLSLSPGQRHNNSSLNTRTQKARHSPNSEVQLLESGGGLVQPGGSLRLSCAASGFTFSQYFMMWVRQAPGKGLEWVSSISPSGGYTQYADSVKGRFTISRDNSKNTLYLQMNSLRAEDTAVYYCAKTGDYTRYYSYGMDVWGQGTLVTVSSGGGGSGGGGSGGGGSQDIQMTQSPSSLSASVGDRVTITCRASQSISSYLNWYQQKPGKAPKLLIYAASSLQSGVPSRFSGSGSGTDFTLIISSLQPEDFATYYCQQSYSTPLTFGGGTKVEIK

SEQ ID NO: 666 - protein, 758 aa, Artificial Sequence
  Made in a lab
MDFQVQIFSFLLISASVIMSRGLPAQVAFTPYAPEPGSTCRLREYYDQTAQMCCSKCSPGQHAKVFCTKTSDTVCDSCEDSTYTQLWNWVPECLSCGSRCSSDQVETQACTREQNRICTCRPGWYCALSKQEGCRLCAPLRKCRPGFGVARPGTETSDVVCKPCAPGTFSNTTSSTDICRPHQICNVVAIPGNASMDAVCTSTSPTRSMAPGAVHLPQPVSTRSQHTQPTPEPSTAPSTSFLLPMGPSPPAEGSTGDTGEPKSSDKTHTCPPCPAPEAAGAPSVFLFPPKPKDTLMISRTPEVTCVVVDVSHEDPEVKFNWYVDGVEVHNAKTKPREEQYNSTYRVVSVLTVLHQDWLNGKAYACAVSNKALPAPIEKTISKAKGQPREPQVYTLPPSRDELTKNQVSLTCLVKGFYPSDIAVEWESNGQPENNYKTTPPVLDSDGSFFLYSKLTVDKSRWQQGNVFSCSVMHEALHNHYTQKSLSLSPGQRHNNSSLNTRTQKARHSPNSEVQLLESGGGLVQPGGSLRLSCAASGFTFSGYSMAWVRQAPGKGLEWVSGIYSSGGWTWYADSVKGRFTISRDNSKNTLYLQMNSLRAEDTAVYYCTRDQSFSYDSSLDAFDIWGQGTMVTVSSGGGGSGGGGSGGGGSQDIQMTQSPSSLSASVGDRVTITCRASQSINNYLNWYQQKPGKAPKLLIYTASTLHSGVPSRFSGSGSGTDFTLTISNLQPEDFATYYCQQSYATLRTFGQGTKVEIK

SEQ ID NO: 667 - protein, 760 aa, Artificial Sequence [sequence omitted]

SEQ ID NO: 668 - protein, 752 aa, Artificial Sequence
  Made in a lab
MDFQVQIFSFLLISASVIMSRGLPAQVAFTPYAPEPGSTCRLREYYDQTAQMCCSKCSPGQHAKVFCTKTSDTVCDSCEDSTYTQLWNWVPECLSCGSRCSSDQVETQACTREQNRICTCRPGWYCALSKQEGCRLCAPLRKCRPGFGVARPGTETSDVVCKPCAPGTFSNTTSSTDICRPHQICNVVAIPGNASMDAVCTSTSPTRSMAPGAVHLPQPVSTRSQHTQPTPEPSTAPSTSFLLPMGPSPPAEGSTGDTGEPKSSDKTHTCPPCPAPEAAGAPSVFLFPPKPKDTLMISRTPEVTCVVVDVSHEDPEVKFNWYVDGVEVHNAKTKPREEQYNSTYRVVSVLTVLHQDWLNGKAYACAVSNKALPAPIEKTISKAKGQPREPQVYTLPPSRDELTKNQVSLTCLVKGFYPSDIAVEWESNGQPENNYKTTPPVLDSDGSFFLYSKLTVDKSRWQQGNVFSCSVMHEALHNHYTQKSLSLSPGQRHNNSSLNTRTQKARHSPNSEVQLLESGGGLVQPGGSLRLSCAASGFTFSHYGMDWVRQAPGKGLEWVSSIYSSGGYTLYADSVKGRFTISRDNSKNTLYLQMNSLRAEDTATYYCATRTWADAFDVWGQGTTVTVSSGGGGSGGGGSGGGGSQDIQMTQSPSTLSASVGDRVTFTCRASQSVNNWVAWYQQKPGKAPKLLIYAASSLQSGVPSRFSGSGSGTDFTLTISSLQPEDFATYYCQQSYSMPLTFGGGTKVEIK

SEQ ID NO: 669 - protein, 752 aa, Artificial Sequence
  Made in a lab
MDFQVQIFSFLLISASVIMSRGEVQLLESGGGLVQPGGSLRLSCAASGFTFSHYMMAWVRQAPGKGLEWVSYIYPSGGWTSYADSVKGRFTISRDNSKNTLYLQMNSLRAEDTAVYYCARFDYTIGFDFWGQGTLVTVSSGGGGSGGGGSGGGGSQDIQMTQSPSSLSASVGDRVTITCRASQSISSYLNWYQQKPGKAPKLLIYAASSLQSGVPSRFSGSGSGTDFTLTISSLQPEDFATYYCQQSYSTPRTFGQGTKVEIKTGEPKSSDKTHTCPPCPAPEAAGAPSVFLFPPKPKDTLMISRTPEVTCVVVDVSHEDPEVKFNWYVDGVEVHNAKTKPREEQYNSTYRVVSVLTVLHQDWLNGKAYACAVSNKALPAPIEKTISKAKGQPREPQVYTLPPSRDELTKNQVSLTCLVKGFYPSDIAVEWESNGQPENNYKTTPPVLDSDGSFFLYSKLTVDKSRWQQGNVFSCSVMHEALHNHYTQKSLSLSPGQRHNNSSLNTRTQKARHSPNSLPAQVAFTPYAPEPGSTCRLREYYDQTAQMCCSKCSPGQHAKVFCTKTSDTVCDSCEDSTYTQLWNWVPECLSCGSRCSSDQVETQACTREQNRICTCRPGWYCALSKQEGCRLCAPLRKCRPGFGVARPGTETSDVVCKPCAPGTFSNTTSSTDICRPHQICNVVAIPGNASMDAVCTSTSPTRSMAPGAVHLPQPVSTRSQHTQPTPEPSTAPSTSFLLPMGPSPPAEGSTGD

SEQ ID NO: 670 - protein, 759 aa, Artificial Sequence [sequence omitted]

SEQ ID NO: 671 - protein, 257 aa, Human
MAPVAVWAALAVGLELWAAAHALPAQVAFTPYAPEPGSTCRLREYYDQTAQMCCSKCSPGQHAKVFCTKTSDTVCDSCEDSTYTQLWNWVPECLSCGSRCSSDQVETQACTREQNRICTCRPGWYCALSKQEGCRLCAPLRKCRPGFGVARPGTETSDVVCKPCAPGTFSNTTSSTDICRPHQICNVVAIPGNASMDAVCTSTSPTRSMAPGAVHLPQPVSTRSQHTQPTPEPSTAPSTSFLLPMGPSPPAEGSTGD

SEQ ID NO: 672 - protein, 211 aa, Human
MGLSTVPDLLLPLVLLELLVGIYPSGVIGLVPHLGDREKRDSVCPQGKYIHPQNNSICCTKCHKGTYLYNDCPGPGQDTDCRECESGSFTASENHLRHCLSCSKCRKEMGQVEISSCTVDRDTVCGCRKNQYRHYWSENLFQCFNCSLCLNGTVHLSCQEKQNTVCTCHAGFFLRENECVSCSNCKKSLECTKLCLPQIENVKGTEDSGTT

SEQ ID NO: 673 - DNA, 2270 bp, Artificial Sequence
  Made in a lab
aagcttgccgccatggattttcaagtgcagattttcagcttcctgctaatcagtgcttcagtcataatgtcgcgaggattgcccgcccaggtggcatttacaccctacgccccggagcccgggagcacatgccggctcagagaatactatgaccagacagctcagatgtgctgcagcaaatgctcgccgggccaacatgcaaaagtcttctgtaccaagacctcggacaccgtgtgtgactcctgtgaggacagcacatacacccagctctggaactgggttcccgagtgcttgagctgtggctcccgctgtagctctgaccaggtggaaactcaagcctgcactcgggaacagaaccgcatctgcacctgcaggcccggctggtactgcgcgctgagcaagcaggaggggtgccggctgtgcgcgccgctgcgcaagtgccgcccgggcttcggcgtggccagaccaggaactgaaacatcagacgtggtgtgcaagccctgtgccccggggacgttctccaacacgacttcatccacggatatttgcaggccccaccagatctgtaacgtggtggccatccctgggaatgcaagcatggatgcagtctgcacgtccacgtcccccacccggagtatggccccaggggcagtacacttaccccagccagtgtccacacgatcccaacacacgcagccaactccagaacccagcactgctccaagcacctccttcctgctcccaatgggccccagccccccagctgaagggagcactggcgacaccggtgagcccaaatcttctgacaaaactcacacatgcccaccgtgcccagcacctgaagccgcgggtgcaccgtcagtcttcctcttccccccaaaacccaaggacaccctcatgatctcccggacccctgaggtcacatgcgtggtggtggacgtgagccacgaagaccctgaggtcaagttcaactggtacgtggacggcgtggaggtgcataatgccaagacaaagccgcgggaggagcagtacaacagcacgtaccgtgtggtcagcgtcctcaccgtcctgcaccaggactggctgaatggcaaggcgtacgcgtgcgcggtctccaacaaagccctcccagcccccatcgagaaaaccatctccaaagccaaagggcagccccgagaaccacaggtgtacaccctgcccccatcccgggatgagctgaccaagaaccaggtcagcctgacctgcctggtcaaaggcttctatccaagcgacatcgccgtggagtgggagagcaatgggcagccggagaacaactacaagaccacgcctcccgtgctggactccgacggctccttcttcctctacagcaagctcaccgtggacaagagcaggtggcagcaggggaacgtcttctcatgctccgtgatgcatgaggctctgcacaaccactacacgcagaagagcctctccctgtctccgggtcagaggcacaacaattcttccctgaatacaagaactcagaaagcacgtcattctccgaattctgaagttcaattgttagagtctggtggcggtcttgttcagcctggtggttctttacgtctttcttgcgctgcttccggattcactttctctaagtactctatgcattgggttcgccaagctcctggtaaaggtttggagtgggtttcttctatctggccttctggtggctggactacttatgctgactccgttaaaggtcgcttcactatctctagagacaactctaagaatactctctacttgcagatgaacagcttaagggctgaggacacggccgtgtattactgtgcgagaggtggttattactacgcccttgactactggggccagggaaccctggtcaccgtctcaagcggtggcggcggttcggggggtggcggaagtggaggtggagggagtcagagcgaattgactcagccaccctcagtgtccgtgtccccaggacagacagccaccatcacctgctctggagaaaaattgggggatatatatgcttcctggtatcagcagaagccaggccagtccccggtcttggtcatctatcaagataccaagcggccctcagggatccctgtgcgattctctggctccaactctgggaacacagccactctgaccatcagcgggacccaggctatggatgaggctgactattactgtcaggcgtgggacagcagcacggtattcggcggagggaccaagctgaccgtcctatgagcggccgc

SEQ ID NO: 674 - DNA, 2297 bp, Artificial Sequence
  Made in a lab
aagcttgccgccatggattttcaagtgcagattttcagcttcctgctaatcagtgcttcagtcataatgtcgcgaggattgcccgcccaggtggcatttacaccctacgccccggagcccgggagcacatgccggctcagagaatactatgaccagacagctcagatgtgctgcagcaaatgctcgccgggccaacatgcaaaagtcttctgtaccaagacctcggacaccgtgtgtgactcctgtgaggacagcacatacacccagctctggaactgggttcccgagtgcttgagctgtggctcccgctgtagctctgaccaggtggaaactcaagcctgcactcgggaacagaaccgcatctgcacctgcaggcccggctggtactgcgcgctgagcaagcaggaggggtgccggctgtgcgcgccgctgcgcaagtgccgcccgggcttcggcgtggccagaccaggaactgaaacatcagacgtggtgtgcaagccctgtgccccggggacgttctccaacacgacttcatccacggatatttgcaggccccaccagatctgtaacgtggtggccatccctgggaatgcaagcatggatgcagtctgcacgtccacgtcccccacccggagtatggccccaggggcagtacacttaccccagccagtgtccacacgatcccaacacacgcagccaactccagaacccagcactgctccaagcacctccttcctgctcccaatgggccccagccccccagctgaagggagcactggcgacaccggtgagcccaaatcttctgacaaaactcacacatgcccaccgtgcccagcacctgaagccgcgggtgcaccgtcagtcttcctcttccccccaaaacccaaggacaccctcatgatctcccggacccctgaggtcacatgcgtggtggtggacgtgagccacgaagaccctgaggtcaagttcaactggtacgtggacggcgtggaggtgcataatgccaagacaaagccgcgggaggagcagtacaacagcacgtaccgtgtggtcagcgtcctcaccgtcctgcaccaggactggctgaatggcaaggcgtacgcgtgcgcggtctccaacaaagccctcccagcccccatcgagaaaaccatctccaaagccaaagggcagccccgagaaccacaggtgtacaccctgcccccatcccgggatgagctgaccaagaaccaggtcagcctgacctgcctggtcaaaggcttctatccaagcgacatcgccgtggagtgggagagcaatgggcagccggagaacaactacaagaccacgcctcccgtgctggactccgacggctccttcttcctctacagcaagctcaccgtggacaagagcaggtggcagcaggggaacgtcttctcatgctccgtgatgcatgaggctctgcacaaccactacacgcagaagagcctctccctgtctccgggtcagaggcacaacaattcttccctgaatacaagaactcagaaagcacgtcattctccgaattctgaagttcaattgttagagtctggtggcggtcttgttcagcctggtggttctttacgtctttcttgcgctgcttccggattcactttctctttttaccagatgcattgggttcgccaagctcctggtaaaggtttggagtgggtttctggtatctatccttctggtggctatactaagtatgctgactccgttaaaggtcgcttcactatctctagagacaactctaagaatactctctacttgcagatgaacagcttaagggctgaggacactgcagtctactattgtgcgagagatctagggtacggcagcagctggtactactttgactactggggccagggaaccctggtcaccgtctcaagcggtggcggcggttcggggggtggcggaagtggaggtggagggagtcagagcgctttgactcagcctgcctccgtgtctgggtctcctggacagtcgatcaccatctcctgcagtggaaccgacagtgacgttggtggttataaccatgtctcctggtaccaacaacacccaggcaaggcccccaaactcataatttatgatgtcgatcatcggccctcagggatctctaaccgtttctctggctccaagtctggcaacacggcctccctgaccatctctgggctccaggctgaggacgaggctgattattactgcagctcatatagaagcggtagcacttatgtcttcggaactgggaccaaggtcaccgtcctatgagcggccgc

SEQ ID NO: 675 - DNA, 2276 bp, Artificial Sequence
  Made in a lab
aagcttgccgccatggattttcaagtgcagattttcagcttcctgctaatcagtgcttcagtcataatgtcgcgaggattgcccgcccaggtggcatttacaccctacgccccggagcccgggagcacatgccggctcagagaatactatgaccagacagctcagatgtgctgcagcaaatgctcgccgggccaacatgcaaaagtcttctgtaccaagacctcggacaccgtgtgtgactcctgtgaggacagcacatacacccagctctggaactgggttcccgagtgcttgagctgtggctcccgctgtagctctgaccaggtggaaactcaagcctgcactcgggaacagaaccgcatctgcacctgcaggcccggctggtactgcgcgctgagcaagcaggaggggtgccggctgtgcgcgccgctgcgcaagtgccgcccgggcttcggcgtggccagaccaggaactgaaacatcagacgtggtgtgcaagccctgtgccccggggacgttctccaacacgacttcatccacggatatttgcaggccccaccagatctgtaacgtggtggccatccctgggaatgcaagcatggatgcagtctgcacgtccacgtcccccacccggagtatggccccaggggcagtacacttaccccagccagtgtccacacgatcccaacacacgcagccaactccagaacccagcactgctccaagcacctccttcctgctcccaatgggccccagccccccagctgaagggagcactggcgacaccggtgagcccaaatcttctgacaaaactcacacatgcccaccgtgcccagcacctgaagccgcgggtgcaccgtcagtcttcctcttccccccaaaacccaaggacaccctcatgatctcccggacccctgaggtcacatgcgtggtggtggacgtgagccacgaagaccctgaggtcaagttcaactggtacgtggacggcgtggaggtgcataatgccaagacaaagccgcgggaggagcagtacaacagcacgtaccgtgtggtcagcgtcctcaccgtcctgcaccaggactggctgaatggcaaggcgtacgcgtgcgcggtctccaacaaagccctcccagcccccatcgagaaaaccatctccaaagccaaagggcagccccgagaaccacaggtgtacaccctgcccccatcccgggatgagctgaccaagaaccaggtcagcctgacctgcctggtcaaaggcttctatccaagcgacatcgccgtggagtgggagagcaatgggcagccggagaacaactacaagaccacgcctcccgtgctggactccgacggctccttcttcctctacagcaagctcaccgtggacaagagcaggtggcagcaggggaacgtcttctcatgctccgtgatgcatgaggctctgcacaaccactacacgcagaagagcctctccctgtctccgggtcagaggcacaacaattcttccctgaatacaagaactcagaaagcacgtcattctccgaattctgaagttcaattgttagagtctggtggcggtcttgttcagcctggtggttctttacgtctttcttgcgctgcttccggattcactttctctaagtactctatgcattgggttcgccaagctcctggtaaaggtttggagtgggtttctggtatctctccttctggctatactcgttatgctgactccgttaaaggtcgcttcactatctctagagacaactctaagaatactctctacttgcagatgaacagcttaagggctgaggacacggccgtgtattactgtgcgagggaccagctgctagaggcttttgatatctggggccaagggaccacggtcaccgtctcaagcggtggcggcggttcggggggtggcggaagtggaggtggagggagtcaagacatccagatgacccagtctccactctccctgtctgcatctgtgggagacagagtcaccatcacttgccgggcaagtcagagcattagcagctatttaaattggtatcagcaaaaaccaggggaagcccctaagctcctcatctatgctgcatccgctttgcaaagtggggtcccgtcaaggttcagtggcagtggacttgggacagttttcactctcaccatcaccagcctgcaacctgaagattctgcaacttactattgtcaacagagttacagtcccccggtcactttcggcggagggaccaaggtggagatcaaatgagcggccgc

SEQ ID NO: 676 - DNA, 2279 bp, Artificial Sequence
  Made in a lab
aagcttgccgccatggattttcaagtgcagattttcagcttcctgctaatcagtgcttcagtcataatgtcgcgaggattgcccgcccaggtggcatttacaccctacgccccggagcccgggagcacatgccggctcagagaatactatgaccagacagctcagatgtgctgcagcaaatgctcgccgggccaacatgcaaaagtcttctgtaccaagacctcggacaccgtgtgtgactcctgtgaggacagcacatacacccagctctggaactgggttcccgagtgcttgagctgtggctcccgctgtagctctgaccaggtggaaactcaagcctgcactcgggaacagaaccgcatctgcacctgcaggcccggctggtactgcgcgctgagcaagcaggaggggtgccggctgtgcgcgccgctgcgcaagtgccgcccgggcttcggcgtggccagaccaggaactgaaacatcagacgtggtgtgcaagccctgtgccccggggacgttctccaacacgacttcatccacggatatttgcaggccccaccagatctgtaacgtggtggccatccctgggaatgcaagcatggatgcagtctgcacgtccacgtcccccacccggagtatggccccaggggcagtacacttaccccagccagtgtccacacgatcccaacacacgcagccaactccagaacccagcactgctccaagcacctccttcctgctcccaatgggccccagccccccagctgaagggagcactggcgacaccggtgagcccaaatcttctgacaaaactcacacatgcccaccgtgcccagcacctgaagccgcgggtgcaccgtcagtcttcctcttccccccaaaacccaaggacaccctcatgatctcccggacccctgaggtcacatgcgtggtggtggacgtgagccacgaagaccctgaggtcaagttcaactggtacgtggacggcgtggaggtgcataatgccaagacaaagccgcgggaggagcagtacaacagcacgtaccgtgtggtcagcgtcctcaccgtcctgcaccaggactggctgaatggcaaggcgtacgcgtgcgcggtctccaacaaagccctcccagcccccatcgagaaaaccatctccaaagccaaagggcagccccgagaaccacaggtgtacaccctgcccccatcccgggatgagctgaccaagaaccaggtcagcctgacctgcctggtcaaaggcttctatccaagcgacatcgccgtggagtgggagagcaatgggcagccggagaacaactacaagaccacgcctcccgtgctggactccgacggctccttcttcctctacagcaagctcaccgtggacaagagcaggtggcagcaggggaacgtcttctcatgctccgtgatgcatgaggctctgcacaaccactacacgcagaagagcctctccctgtctccgggtcagaggcacaacaattcttccctgaatacaagaactcagaaagcacgtcattctccgaattctgaagttcaattgttagagtctggtggcggtcttgttcagcctggtggttctttacgtctttcttgcgctgcttccggattcactttctctgagtaccctatgaattgggttcgccaagctcctggtaaaggtttggagtgggtttctggtatctattcttctggtggccttactaagtatgctgactccgttaaaggtcgcttcactatctctagagacaactctaagaatactctctacttgcagatgaacagcttaagggctgaggacacggccgtgtattactgtgcgagagatcactacggtgactacgcatttgactactggggccagggaaccctggtcaccgtctcaagcggtggcggcggttcggggggtggcggaagtggaggtggagggagtcaagacatccagatgacccagtctccttccaccctgtctgcatctgtaggagacagagtcaccatcacttgccgggccagtcagagtattagtagctggttggcctggtatcagcagaaaccagggaaagcccctaagctcctgatctataaggcatctagtttagaaagtggggtcccatcaaggttcagcggcagtggatctgggacagaattcactctcaccatcagcagcctgcagcctgatgattttgcaacttattactgccaacagtataatagttattggacgttcggccaagggaccaaggtggaaatcaaatgagcggccgc

SEQ ID NO: 677 - DNA, 2306 bp, Artificial Sequence
  Made in a lab
agcttgccgccatggattttcaagtgcagattttcagcttcctgctaatcagtgcttcagtcataatgtcgcgaggattgcccgcccaggtggcatttacaccctacgccccggagcccgggagcacatgccggctcagagaatactatgaccagacagctcagatgtgctgcagcaaatgctcgccgggccaacatgcaaaagtcttctgtaccaagacctcggacaccgtgtgtgactcctgtgaggacagcacatacacccagctctggaactgggttcccgagtgcttgagctgtggctcccgctgtagctctgaccaggtggaaactcaagcctgcactcgggaacagaaccgcatctgcacctgcaggcccggctggtactgcgcgctgagcaagcaggaggggtgccggctgtgcgcgccgctgcgcaagtgccgcccgggcttcggcgtggccagaccaggaactgaaacatcagacgtggtgtgcaagccctgtgccccggggacgttctccaacacgacttcatccacggatatttgcaggccccaccagatctgtaacgtggtggccatccctgggaatgcaagcatggatgcagtctgcacgtccacgtcccccacccggagtatggccccaggggcagtacacttaccccagccagtgtccacacgatcccaacacacgcagccaactccagaacccagcactgctccaagcacctccttcctgctcccaatgggccccagccccccagctgaagggagcactggcgacaccggtgagcccaaatcttctgacaaaactcacacatgcccaccgtgcccagcacctgaagccgcgggtgcaccgtcagtcttcctcttccccccaaaacccaaggacaccctcatgatctcccggacccctgaggtcacatgcgtggtggtggacgtgagccacgaagaccctgaggtcaagttcaactggtacgtggacggcgtggaggtgcataatgccaagacaaagccgcgggaggagcagtacaacagcacgtaccgtgtggtcagcgtcctcaccgtcctgcaccaggactggctgaatggcaaggcgtacgcgtgcgcggtctccaacaaagccctcccagcccccatcgagaaaaccatctccaaagccaaagggcagccccgagaaccacaggtgtacaccctgcccccatcccgggatgagctgaccaagaaccaggtcagcctgacctgcctggtcaaaggcttctatccaagcgacatcgccgtggagtgggagagcaatgggcagccggagaacaactacaagaccacgcctcccgtgctggactccgacggctccttcttcctctacagcaagctcaccgtggacaagagcaggtggcagcaggggaacgtcttctcatgctccgtgatgcatgaggctctgcacaaccactacacgcagaagagcctctccctgtctccgggtcagaggcacaacaattcttccctgaatacaagaactcagaaagcacgtcattctccgaattctgaagttcaattgttagagtctggtggcggtcttgttcagcctggtggttctttacgtctttcttgcgctgcttccggattcactttctctctttacgagatggtttgggttcgccaagctcctggtaaaggtttggagtgggtttctggtatctggccttctggtggctggactcagtatgctgactccgttaaaggtcgcttcactatctctagagacaactctaagaatactctctacttgcagatgaacagcttaagggctgaggacacggccgtgtattactgtgcgagagatctagcagtggctggttgggattactactactactacggtatggacgtctggggccaagggaccacggtcaccgtctcaagcggtggcggcggttcggggggtggcggaagtggaggtggagggagtcaagacatccagatgacccagtctccagccaccctgtctttgtctccaggggaaagagccaccctctcctgcagggccagtcagagtgtcagcagctacttagcctggtaccaacagaaacctggccaggctcccaggctcctcatctatgatgcatccaacagggccactggcatcccagccaggttcagtggcagtgggtctgggacagacttcactctcaccatcagcagcctagagcctgaagattctgcagtttattactgtcagcaacgtagcaactggcctccgttcactttcggcggagggaccaaggtggagatcaaatgagcggccgcc

SEQ ID NO: 678 - DNA, 2300 bp, Artificial Sequence
  Made in a lab
aagcttgccgccatggattttcaagtgcagattttcagcttcctgctaatcagtgcttcagtcataatgtcgcgaggattgcccgcccaggtggcatttacaccctacgccccggagcccgggagcacatgccggctcagagaatactatgaccagacagctcagatgtgctgcagcaaatgctcgccgggccaacatgcaaaagtcttctgtaccaagacctcggacaccgtgtgtgactcctgtgaggacagcacatacacccagctctggaactgggttcccgagtgcttgagctgtggctcccgctgtagctctgaccaggtggaaactcaagcctgcactcgggaacagaaccgcatctgcacctgcaggcccggctggtactgcgcgctgagcaagcaggaggggtgccggctgtgcgcgccgctgcgcaagtgccgcccgggcttcggcgtggccagaccaggaactgaaacatcagacgtggtgtgcaagccctgtgccccggggacgttctccaacacgacttcatccacggatatttgcaggccccaccagatctgtaacgtggtggccatccctgggaatgcaagcatggatgcagtctgcacgtccacgtcccccacccggagtatggccccaggggcagtacacttaccccagccagtgtccacacgatcccaacacacgcagccaactccagaacccagcactgctccaagcacctccttcctgctcccaatgggccccagccccccagctgaagggagcactggcgacaccggtgagcccaaatcttctgacaaaactcacacatgcccaccgtgcccagcacctgaagccgcgggtgcaccgtcagtcttcctcttccccccaaaacccaaggacaccctcatgatctcccggacccctgaggtcacatgcgtggtggtggacgtgagccacgaagaccctgaggtcaagttcaactggtacgtggacggcgtggaggtgcataatgccaagacaaagccgcgggaggagcagtacaacagcacgtaccgtgtggtcagcgtcctcaccgtcctgcaccaggactggctgaatggcaaggcgtacgcgtgcgcggtctccaacaaagccctcccagcccccatcgagaaaaccatctccaaagccaaagggcagccccgagaaccacaggtgtacaccctgcccccatcccgggatgagctgaccaagaaccaggtcagcctgacctgcctggtcaaaggcttctatccaagcgacatcgccgtggagtgggagagcaatgggcagccggagaacaactacaagaccacgcctcccgtgctggactccgacggctccttcttcctctacagcaagctcaccgtggacaagagcaggtggcagcaggggaacgtcttctcatgctccgtgatgcatgaggctctgcacaaccactacacgcagaagagcctctccctgtctccgggtcagaggcacaacaattcttccctgaatacaagaactcagaaagcacgtcattctccgaattctgaagttcaattgttagagtctggtggcggccttgttcagcctggtggttctttacgtctttcttgcgctgcttccggattcactttctctcagtacaatatgatttgggttcgccaagctcctggtaaaggtttggagtgggtttcttggatctcttcttctggcggtactgagtatgctgactccgttaaaggtcgcttcactatctctagagacaactctaagaatactctctacttgcagatgaacagcttaagggctgaggacacggccgtgtattactgtgcaaaagaccgaggatatggttcggggagttatggggcttatgatgcttttgatatctggggtcaagggacaatggtcaccgtctcaagcggtggcggcggttcggggggtggcggaagtggaggtggagggagtcaagacatccagatgacccagtctccatcctccctgtctgcatctgtaggagacagagtcaccatcacttgccagacaagtcagagcattgacaggtatttaaattggtatcagcagaaagcaggggaagcccctaaactcctgatctatgctgcatccagtttgcaaagtggggtcccatcaaggttcagtggcagtggatctgggacagatttcactctcaccatcagcagtctgcaacctgaagattttgcaagttactactgtcaacagagttacaggaccccccggacgttcggccaagggaccaaggtggagatcaaatgagcggccgc

SEQ ID NO: 679 - DNA, 2285 bp, Artificial Sequence
  Made in a lab
aagcttgccgccatggattttcaagtgcagattttcagcttcctgctaatcagtgcttcagtcataatgtcgcgaggattgcccgcccaggtggcatttacaccctacgccccggagcccgggagcacatgccggctcagagaatactatgaccagacagctcagatgtgctgcagcaaatgctcgccgggccaacatgcaaaagtcttctgtaccaagacctcggacaccgtgtgtgactcctgtgaggacagcacatacacccagctctggaactgggttcccgagtgcttgagctgtggctcccgctgtagctctgaccaggtggaaactcaagcctgcactcgggaacagaaccgcatctgcacctgcaggcccggctggtactgcgcgctgagcaagcaggaggggtgccggctgtgcgcgccgctgcgcaagtgccgcccgggcttcggcgtggccagaccaggaactgaaacatcagacgtggtgtgcaagccctgtgccccggggacgttctccaacacgacttcatccacggatatttgcaggccccaccagatctgtaacgtggtggccatccctgggaatgcaagcatggatgcagtctgcacgtccacgtcccccacccggagtatggccccaggggcagtacacttaccccagccagtgtccacacgatcccaacacacgcagccaactccagaacccagcactgctccaagcacctccttcctgctcccaatgggccccagccccccagctgaagggagcactggcgacaccggtgagcccaaatcttctgacaaaactcacacatgcccaccgtgcccagcacctgaagccgcgggtgcaccgtcagtcttcctcttccccccaaaacccaaggacaccctcatgatctcccggacccctgaggtcacatgcgtggtggtggacgtgagccacgaagaccctgaggtcaagttcaactggtacgtggacggcgtggaggtgcataatgccaagacaaagccgcgggaggagcagtacaacagcacgtaccgtgtggtcagcgtcctcaccgtcctgcaccaggactggctgaatggcaaggcgtacgcgtgcgcggtctccaacaaagccctcccagcccccatcgagaaaaccatctccaaagccaaagggcagccccgagaaccacaggtgtacaccctgcccccatcccgggatgagctgaccaagaaccaggtcagcctgacctgcctggtcaaaggcttctatccaagcgacatcgccgtggagtgggagagcaatgggcagccggagaacaactacaagaccacgcctcccgtgctggactccgacggctccttcttcctctacagcaagctcaccgtggacaagagcaggtggcagcaggggaacgtcttctcatgctccgtgatgcatgaggctctgcacaaccactacacgcagaagagcctctccctgtctccgggtcagaggcacaacaattcttccctgaatacaagaactcagaaagcacgtcattctccgaattctgaagttcaattgttagagtctggtggcggtcttgttcagcctggtggttctttacgtctttcttgcgctgcttccggattcactttctctcattactctatgggttgggttcgccaagctcctggtaaaggtttggagtgggtttcttctatctatccttctggtggctctactctttatgctgactccgttaaaggtcgcttcactatctctagagacaactctaagaatactctctacttgcagatgaacagcttaagggctgaggacacggccgtgtattactgtgcgagatggggagtgggagctacgttcgactactggggccagggcaccctggtcaccgtctcaagcggtggcggcggttcggggggtggcggaagtggaggtggagggagtcaagacatccagatgacccagtctccaggcaccctgtctttgtctccaggggaaagagccaccctctcctgcagggccagtcagagtgttagcagcagctacttagcctggtaccagcagaaacctggccaggctcccaggctcctcatctatggtgcatccagcagggccactggcatcccagacaggttcagtggcagtgggtctgggacagacttcactctcaccatcagcagactggagcctgaagattttgcagtgtattactgtcagcagtatggtagctcacctctctggacgttcggccaagggaccaaggtsgaaatcaaatgagcggccgc

SEQ ID NO: 680 - DNA, 2279 bp, Artificial Sequence
  Made in a lab
aagcttgccgccatggattttcaagtgcagattttcagcttcctgctaatcagtgcttcagtcataatgtcgcgaggattgcccgcccaggtggcatttacaccctacgccccggagcccgggagcacatgccggctcagagaatactatgaccagacagctcagatgtgctgcagcaaatgctcgccgggccaacatgcaaaagtcttctgtaccaagacctcggacaccgtgtgtgactcctgtgaggacagcacatacacccagctctggaactgggttcccgagtgcttgagctgtggctcccgctgtagctctgaccaggtggaaactcaagcctgcactcgggaacagaaccgcatctgcacctgcaggcccggctggtactgcgcgctgagcaagcaggaggggtgccggctgtgcgcgccgctgcgcaagtgccgcccgggcttcggcgtggccagaccaggaactgaaacatcagacgtggtgtgcaagccctgtgccccggggacgttctccaacacgacttcatccacggatatttgcaggccccaccagatctgtaacgtggtggccatccctgggaatgcaagcatggatgcagtctgcacgtccacgtcccccacccggagtatggccccaggggcagtacacttaccccagccagtgtccacacgatcccaacacacgcagccaactccagaacccagcactgctccaagcacctccttcctgctcccaatgggccccagccccccagctgaagggagcactggcgacaccggtgagcccaaatcttctgacaaaactcacacatgcccaccgtgcccagcacctgaagccgcgggtgcaccgtcagtcttcctcttccccccaaaacccaaggacaccctcatgatctcccggacccctgaggtcacatgcgtggtggtggacgtgagccacgaagaccctgaggtcaagttcaactggtacgtggacggcgtggaggtgcataatgccaagacaaagccgcgggaggagcagtacaacagcacgtaccgtgtggtcagcgtcctcaccgtcctgcaccaggactggctgaatggcaaggcgtacgcgtgcgcggtctccaacaaagccctcccagcccccatcgagaaaaccatctccaaagccaaagggcagccccgagaaccacaggtgtacaccctgcccccatcccgggatgagctgaccaagaaccaggtcagcctgacctgcctggtcaaaggcttctatccaagcgacatcgccgtggagtgggagagcaatgggcagccggagaacaactacaagaccacgcctcccgtgctggactccgacggctccttcttcctctacagcaagctcaccgtggacaagagcaggtggcagcaggggaacgtcttctcatgctccgtgatgcatgaggctctgcacaaccactacacgcagaagagcctctccctgtctccgggtcagaggcacaacaattcttccctgaatacaagaactcagaaagcacgtcattctccgaattctgaagttcaattgttagagtctggtggcggtcttgttcagcctggtggttctttacgtctttcttgcgctgcttccggattcactttctctcattacatgatggcttgggttcgccaagctcctggtaaaggtttggagtgggtttcttatatctatccttctggtggctggacttcttatgctgactccgttaaaggtcgcttcactatctctagagacaactctaagaatactctctacttgcagatgaacagcttaagggctgaggacacggccgtgtattactgtgcgagattcgactatactataggttttgacttctggggccagggaaccctggtcaccgtctcaagcggtggcggcggttcggggggtggcggaagtggaggtggagggagtcaagacatccagatgacccagtctccatcctccctgtctgcatctgtaggagacagagtcaccatcacttgccgggcaagtcagagcattagcagctatttaaattggtatcagcagaaaccagggaaagcccctaagctcctgatctatgctgcatccagtttgcaaagtggggtcccatcaaggttcagtggcagtggatctgggacagatttcactctcaccatcagcagtctgcaacctgaagattttgcaacttactactgtcaacagagttacagtacccctcggacgttcggccaagggaccaaggtggaaatcaaatgagcggccgc

SEQ ID NO: 681 - DNA, 2376 bp, Artificial Sequence
  Made in a lab
ggcttatcgaattaatacgactcactatagggagacccaagcttgccgccatggattttcaagtgcagattttcagcttcctgctaatcagtgcttcagtcataatgtcgcgaggattgcccgcccaggtggcatttacaccctacgccccggagcccgggagcacatgccggctcagagaatactatgaccagacagctcagatgtgctgcagcaaatgctcgccgggccaacatgcaaaagtcttctgtaccaagacctcggacaccgtgtgtgactcctgtgaggacagcacatacacccagctctggaactgggttcccgagtgcttgagctgtggctcccgctgtagctctgaccaggtggaaactcaagcctgcactcgggaacagaaccgcatctgcacctgcaggcccggctggtactgcgcgctgagcaagcaggaggggtgccggctgtgcgcgccgctgcgcaagtgccgcccgggcttcggcgtggccagaccaggaactgaaacatcagacgtggtgtgcaagccctgtgccccggggacgttctccaacacgacttcatccacggatatttgcaggccccaccagatctgtaacgtggtggccatccctgggaatgcaagcatggatgcagtctgcacgtccacgtcccccacccggagtatggccccaggggcagtacacttaccccagccagtgtccacacgatcccaacacacgcagccaactccagaacccagcactgctccaagcacctccttcctgctcccaatgggccccagccccccagctgaagggagcactggcgacaccggtgagcccaaatcttctgacaaaactcacacatgcccaccgtgcccagcacctgaagccgcgggtgcaccgtcagtcttcctcttccccccaaaacccaaggacaccctcatgatctcccggacccctgaggtcacatgcgtggtggtggacgtgagccacgaagaccctgaggtcaagttcaactggtacgtggacggcgtggaggtgcataatgccaagacaaagccgcgggaggagcagtacaacagcacgtaccgtgtggtcagcgtcctcaccgtcctgcaccaggactggctgaatggcaaggcgtacgcgtgcgcggtctccaacaaagccctcccagcccccatcgagaaaaccatctccaaagccaaagggcagccccgagaaccacaggtgtacaccctgcccccatcccgggatgagctgaccaagaaccaggtcagcctgacctgcctggtcaaaggcttctatccaagcgacatcgccgtggagtgggagagcaatgggcagccggagaacaactacaagaccacgcctcccgtgctggactccgacggctccttcttcctctacagcaagctcaccgtggacaagagcaggtggcagcaggggaacgtcttctcatgctccgtgatgcatgaggctctgcacaaccactacacgcagaagagcctctccctgtctccgggtcagaggcacaacaattcttccctgaatacaagaactcagaaagcacgtcattctccgaattctgaagttcaattgttagagtctggtggcggtcttgttcagcctggtggttctttacgtctttcttgcgctgcttccggattcactttctctcattacggtatgacttgggttcgccaagctcctggtaaaggtttggagtgggtttctggtatccgttcttctggtggcgttactaattatgctgactccgttaaaggtcgcttcactatctctagagacaactctaagaatactctctacttgcagatgaacagcttaagggctgaggacacggccgtgtattactgtgcgagagagggcagtggctggtccaaggcttttgatatctggggccaagggacaatggtcaccgtctcaagcggtggcggcggttcggggggtggcggaagtggaggtggagggagtcaagacatccagatgacccagtctccagccaccctgtctttgtctccaggagaaagagccaccctctcctgtagggccagccagagtattagcacctccttagcctggtaccaacaaatacctgggcaggctcccaggctcctcatgtatgatgcatccaagagggccagtggcatcccggccaggttcagtggcagtgggtctgggacagacctcactctcaccatcagcagcctcgagcctgaagattctgcggtttattactgtcagctgcgtataaactggcctccggaattcactttcggccctgggaccaaagtggatatcaaatgagcggccgcctcgagtctagagggccctattctatagtgtcacctaaatgctagag

SEQ ID NO: 682 - DNA, 2306 bp, Artificial Sequence
  Made in a lab
aagcttgccgccatggattttcaagtgcagattttcagcttcctgctaatcagtgcttcagtcataatgtcgcgaggattgcccgcccaggtggcatttacaccctacgccccggagcccgggagcacatgccggctcagagaatactatgaccagacagctcagatgtgctgcagcaaatgctcgccgggccaacatgcaaaagtcttctgtaccaagacctcggacaccgtgtgtgactcctgtgaggacagcacatacacccagctctggaactgggttcccgagtgcttgagctgtggctcccgctgtagctctgaccaggtggaaactcaagcctgcactcgggaacagaaccgcatctgcacctgcaggcccggctggtactgcgcgctgagcaagcaggaggggtgccggctgtgcgcgccgctgcgcaagtgccgcccgggcttcggcgtggccagaccaggaactgaaacatcagacgtggtgtgcaagccctgtgccccggggacgttctccaacacgacttcatccacggatatttgcaggccccaccagatctgtaacgtggtggccatccctgggaatgcaagcatggatgcagtctgcacgtccacgtcccccacccggagtatggccccaggggcagtacacttaccccagccagtgtccacacgatcccaacacacgcagccaactccagaacccagcactgctccaagcacctccttcctgctcccaatgggccccagccccccagctgaagggagcactggcgacaccggtgagcccaaatcttctgacaaaactcacacatgcccaccgtgcccagcacctgaagccgcgggtgcaccgtcagtcttcctcttccccccaaaacccaaggacaccctcatgatctcccggacccctgaggtcacatgcgtggtggtggacgtgagccacgaagaccctgaggtcaagttcaactggtacgtggacggcgtggaggtgcataatgccaagacaaagccgcgggaggagcagtacaacagcacgtaccgtgtggtcagcgtcctcaccgtcctgcaccaggactggctgaatggcaaggcgtacgcgtgcgcggtctccaacaaagccctcccagcccccatcgagaaaaccatctccaaagccaaagggcagccccgagaaccacaggtgtacaccctgcccccatcccgggatgagctgaccaagaaccaggtcagcctgacctgcctggtcaaaggcttctatccaagcgacatcgccgtggagtgggagagcaatgggcagccggagaacaactacaagaccacgcctcccgtgctggactccgacggctccttcttcctctacagcaagctcaccgtggacaagagcaggtggcagcaggggaacgtcttctcatgctccgtgatgcatgaggctctgcacaaccactacacgcagaagagcctctccctgtctccgggtcagaggcacaacaattcttccctgaatacaagaactcagaaagcacgtcattctccgaattctgaagttcaattgttagagtctggtggcggtcttgttcagcctggtggttctttacgtctttcttgcgctgcttccggattcactttctctcattacaatatgcgttgggttcgccaagctcctggtaaaggtttggagtgggtttcttctatctctccttctggtggctttactggttatgctgactccgttaaaggtcgcttcactatctctagagacaactctaagaatactctctacttgcagatgaacagcttaagggctgaggacacggccgtgtattactgtgcaagagggatcaattactatgatagtagtggttattaccccccggtcggtatggacgtctggggccaagggaccacggtcaccgtctcaagcggtggcggcggttcggggggtggcggaagtggaggtggagggagtcaagacatccagatgacccagtctccatcttccgtgtctgcatctgtaggagacagagtcaccatcacttgtcgggcgagtcggggtgttatcacctggttaaactggtatcaacagaaaccagggagagtccctagccccctgatctttggtgcatccactttgcaaactggggtcccatcaagattcagcggcagtggatctgggacagatttcactctcaccatcaacgacctgcagcctgaagattttgcaacttactattgtcaacagactcacagtttccctctcactttcggcggagggaccaaggtggagatcaaatgagcggccgc

SEQ ID NO: 683 - DNA, 2288 bp, Artificial Sequence
  Made in a lab
aagcttgccgccatggattttcaagtgcagattttcagcttcctgctaatcagtgcttcagtcataatgtcgcgaggattgcccgcccaggtggcatttacaccctacgccccggagcccgggagcacatgccggctcagagaatactatgaccagacagctcagatgtgctgcagcaaatgctcgccgggccaacatgcaaaagtcttctgtaccaagacctcggacaccgtgtgtgactcctgtgaggacagcacatacacccagctctggaactgggttcccgagtgcttgagctgtggctcccgctgtagctctgaccaggtggaaactcaagcctgcactcgggaacagaaccgcatctgcacctgcaggcccggctggtactgcgcgctgagcaagcaggaggggtgccggctgtgcgcgccgctgcgcaagtgccgcccgggcttcggcgtggccagaccaggaactgaaacatcagacgtggtgtgcaagccctgtgccccggggacgttctccaacacgacttcatccacggatatttgcaggccccaccagatctgtaacgtggtggccatccctgggaatgcaagcatggatgcagtctgcacgtccacgtcccccacccggagtatggccccaggggcagtacacttaccccagccagtgtccacacgatcccaacacacgcagccaactccagaacccagcactgctccaagcacctccttcctgctcccaatgggccccagccccccagctgaagggagcactggcgacaccggtgagcccaaatcttctgacaaaactcacacatgcccaccgtgcccagcacctgaagccgcgggtgcaccgtcagtcttcctcttccccccaaaacccaaggacaccctcatgatctcccggacccctgaggtcacatgcgtggtggtggacgtgagccacgaagaccctgaggtcaagttcaactggtacgtggacggcgtggaggtgcataatgccaagacaaagccgcgggaggagcagtacaacagcacgtaccgtgtggtcagcgtcctcaccgtcctgcaccaggactggctgaatggcaaggcgtacgcgtgcgcggtctccaacaaagccctcccagcccccatcgagaaaaccatctccaaagccaaagggcagccccgagaaccacaggtgtacaccctgcccccatcccgggatgagctgaccaagaaccaggtcagcctgacctgcctggtcaaaggcttctatccaagcgacatcgccgtggagtgggagagcaatgggcagccggagaacaactacaagaccacgcctcccgtgctggactccgacggctccttcttcctctacagcaagctcaccgtggacaagagcaggtggcagcaggggaacgtcttctcatgctccgtgatgcatgaggctctgcacaaccactacacgcagaagagcctctccctgtctccgggtcagaggcacaacaattcttccctgaatacaagaactcagaaagcacgtcattctccgaattctgaagttcaattgttagagtctggtggcggtcttgttcagcctggtggttctttacgtctttcttgcgctgcttccggattcactttctcttggtacaatatgctttgggttcgccaagctcctggtaaaggtttggagtgggtttcttctatctctccttctggtggctatactgtttatgctgactccgttaaaggtcgcttcactatctctagagacaactctaagaatactctctacttgcagatgaacagcttaagggctgaggacacggccgtgtattactgtgcacgggaccgtggtgggagccccttccggcctgatgcttttgatatctggggccaagggacaatggtcaccgtctcaagcggtggcggcggttcggggggtggcggaagtggaggtggagggagtcagagcgctttgactcagccaccctcagtgtccgtgtccccaggacagacagccaggatcacctgctctggagataagttgggggaaaaatatgtttcctggtatcagcagcggtcaggccagtcccctctactggtcatttctcaagataccaagcggccctcagggatccctgagcgattctctggctccaactctgggaacacagccactctgaccatcagcggggcccaggctgcagatgaggctgactattactgtcagacgtgggacagcgacacttatgtcttcggaagtgggagcacggtcaccgtcctgtgagcggccgc

SEQ ID NO: 684 - DNA, 2389 bp, Artificial Sequence
  Made in a lab
tggcttatcgattaatacgactcactatagggagacccaagcttgccgccatggattttcaagtgcagattttcagcttcctgctaatcagtgcttcagtcataatgtcgcgaggattgcccgcccaggtggcatttacaccctacgccccggagcccgggagcacatgccggctcagagaatactatgaccagacagctcagatgtgctgcagcaaatgctcgccgggccaacatgcaaaagtcttctgtaccaagacctcggacaccgtgtgtgactcctgtgaggacagcacatacacccagctctggaactgggttcccgagtgcttgagctgtggctcccgctgtagctctgaccaggtggaaactcaagcctgcactcgggaacagaaccgcatctgcacctgcaggcccggctggtactgcgcgctgagcaagcaggaggggtgccggctgtgcgcgccgctgcgcaagtgccgcccgggcttcggcgtggccagaccaggaactgaaacatcagacgtggtgtgcaagccctgtgccccggggacgttctccaacacgacttcatccacggatatttgcaggccccaccagatctgtaacgtggtggccatccctgggaatgcaagcatggatgcagtctgcacgtccacgtcccccacccggagtatggccccaggggcagtacacttaccccagccagtgtccacacgatcccaacacacgcagccaactccagaacccagcactgctccaagcacctccttcctgctcccaatgggccccagccccccagctgaagggagcactggcgacaccggtgagcccaaatcttctgacaaaactcacacatgcccaccgtgcccagcacctgaagccgcgggtgcaccgtcagtcttcctcttccccccaaaacccaaggacaccctcatgatctcccggacccctgaggtcacatgcgtggtggtggacgtgagccacgaagaccctgaggtcaagttcaactggtacgtggacggcgtggaggtgcataatgccaagacaaagccgcgggaggagcagtacaacagcacgtaccgtgtggtcagcgtcctcaccgtcctgcaccaggactggctgaatggcaaggcgtacgcgtgcgcggtctccaacaaagccctcccagcccccatcgagaaaaccatctccaaagccaaagggcagccccgagaaccacaggtgtacaccctgcccccatcccgggatgagctgaccaagaaccaggtcagcctgacctgcctggtcaaaggcttctatccaagcgacatcgccgtggagtgggagagcaatgggcagccggagaacaactacaagaccacgcctcccgtgctggactccgacggctccttcttcctctacagcaagctcaccgtggacaagagcaggtggcagcaggggaacgtcttctcatgctccgtgatgcatgaggctctgcacaaccactacacgcagaagagcctctccctgtctccgggtcagaggcacaacaattcttccctgaatacaagaactcagaaagcacgtcattctccgaattctgaagttcaattgttagagtctggtggcggtcttgttcagcctggtggttctttacgtctttcttgcgctgcttccggattcactttctctgagtacgatatgctttgggttcgccaagctcctggtaaaggtttggagtgggtttcttctatctggccttctggtggctttactcagtatgctgactccgttaaaggtcgcttcactatctctagagacaactctaagaatactctctacttgcagatgaacagcttaagggctgaggacacggctgtgtattactgtgcgaggaattattacgatttttggagtggtccttactactacggtatggacgtctggggccaagggaccacggtcaccgtctcaagcggtggcggcggttcggggggtggcggaagtggaggtggagggagtcaagacatccagatgacccagtctccatcctccctgtctgcatctgtaggagacagagtcaccatcacttgccgggcaagtcagagcattagcagctatttaaattggtatcagcagaaaccagggaaagcccctaagctcctgatctatgctgcatccagtttgcaaagtggggtcccatcaaggttcagtggcagtggatctgggacagatttcactctcaccatcagcagtctgcaacctgaagattttgcaacttactactgtcaacagagttacagtaccctatggacgttcggccaagggaccaaggtggaaatcaaatgagcggccgcctcgagtctagagggccctattctatagtgtcacctaaatgctagagctcg

SEQ ID NO: 685 - DNA, 2290 bp, Artificial Sequence
  Made in a lab
agcttgccgccatggattttcaagtgcagattttcagcttcctgctaatcagtgcttcagtcataatgtcgcgaggattgcccgcccaggtggcatttacaccctacgccccggagcccgggagcacatgccggctcagagaatactatgaccagacagctcagatgtgctgcagcaaatgctcgccgggccaacatgcaaaagtcttctgtaccaagacctcggacaccgtgtgtgactcctgtgaggacagcacatacacccagctctggaactgggttcccgagtgcttgagctgtggctcccgctgtagctctgaccaggtggaaactcaagcctgcactcgggaacagaaccgcatctgcacctgcaggcccggctggtactgcgcgctgagcaagcaggaggggtgccggctgtgcgcgccgctgcgcaagtgccgcccgggcttcggcgtggccagaccaggaactgaaacatcagacgtggtgtgcaagccctgtgccccggggacgttctccaacacgacttcatccacggatatttgcaggccccaccagatctgtaacgtggtggccatccctgggaatgcaagcatggatgcagtctgcacgtccacgtcccccacccggagtatggccccaggggcagtacacttaccccagccagtgtccacacgatcccaacacacgcagccaactccagaacccagcactgctccaagcacctccttcctgctcccaatgggccccagccccccagctgaagggagcactggcgacaccggtgagcccaaatcttctgacaaaactcacacatgcccaccgtgcccagcacctgaagccgcgggtgcaccgtcagtcttcctcttccccccaaaacccaaggacaccctcatgatctcccggacccctgaggtcacatgcgtggtggtggacgtgagccacgaagaccctgaggtcaagttcaactggtacgtggacggcgtggaggtgcataatgccaagacaaagccgcgggaggagcagtacaacagcacgtaccgtgtggtcagcgtcctcaccgtcctgcaccaggactggctgaatggcaaggcgtacgcgtgcgcggtctccaacaaagccctcccagcccccatcgagaaaaccatctccaaagccaaagggcagccccgagaaccacaggtgtacaccctgcccccatcccgggatgagctgaccaagaaccaggtcagcctgacctgcctggtcaaaggcttctatccaagcgacatcgccgtggagtgggagagcaatgggcagccggagaacaactacaagaccacgcctcccgtgctggactccgacggctccttcttcctctacagcaagctcaccgtggacaagagcaggtggcagcaggggaacgtcttctcatgctccgtgatgcatgaggctctgcacaaccactacacgcagaagagcctctccctgtctccgggtcagaggcacaacaattcttccctgaatacaagaactcagaaagcacgtcattctccgaattctgaagttcaattgttagagtctggtggcggtcttgttcagcctggtggttctttacgtctttcttgcgctgcttccggattcactttctctggttacgttatgggttgggttcgccaagctcctggtaaaggtttggagtgggtttcttctatctctccttctggtggctatactctttatgctgactccgttaaaggtcgcttcactatctctagagacaactctaagaatactctctacttgcagatgaacagcttaagggctgaggacacggctgtgtattactgtgcgagagcatttagcaccaggtggtactggggtgcttttgatatctggggccaagggacaatggtcaccgtctcaagcggtggcggcggttcggggggtggcggaagtggaggtggagggagtcaagacatccagatgacccagtctccagccaccctgtctttgtctccaggggaaagagccaccctctcctgcagggccagtcagagtgttaggagctacttagcctggtaccaacagaaacctggccaggctcccaggctcctcatctatgatgcatccaacagggccactggcatcccagccaggttcagtggcagtgggtctgggacagacttcactctcaccatcaccagcctgcagcctgaagatattgcaacatattactgtcaacagtatgataacctcccgctcactttcggcggagggaccaaggtggagatcaaatgagcggccgc

SEQ ID NO: 686 - DNA, 2300 bp, Artificial Sequence
  Made in a lab
aagcttgccgccatggattttcaagtgcagattttcagcttcctgctaatcagtgcttcagtcataatgtcgcgaggattgcccgcccaggtggcatttacaccctacgccccggagcccgggagcacatgccggctcagagaatactatgaccagacagctcagatgtgctgcagcaaatgctcgccgggccaacatgcaaaagtcttctgtaccaagacctcggacaccgtgtgtgactcctgtgaggacagcacatacacccagctctggaactgggttcccgagtgcttgagctgtggctcccgctgtagctctgaccaggtggaaactcaagcctgcactcgggaacagaaccgcatctgcacctgcaggcccggctggtactgcgcgctgagcaagcaggaggggtgccggctgtgcgcgccgctgcgcaagtgccgcccgggcttcggcgtggccagaccaggaactgaaacatcagacgtggtgtgcaagccctgtgccccggggacgttctccaacacgacttcatccacggatatttgcaggccccaccagatctgtaacgtggtggccatccctgggaatgcaagcatggatgcagtctgcacgtccacgtcccccacccggagtatggccccaggggcagtacacttaccccagccagtgtccacacgatcccaacacacgcagccaactccagaacccagcactgctccaagcacctccttcctgctcccaatgggccccagccccccagctgaagggagcactggcgacaccggtgagcccaaatcttctgacaaaactcacacatgcccaccgtgcccagcacctgaagccgcgggtgcaccgtcagtcttcctcttccccccaaaacccaaggacaccctcatgatctcccggacccctgaggtcacatgcgtggtggtggacgtgagccacgaagaccctgaggtcaagttcaactggtacgtggacggcgtggaggtgcataatgccaagacaaagccgcgggaggagcagtacaacagcacgtaccgtgtggtcagcgtcctcaccgtcctgcaccaggactggctgaatggcaaggcgtacgcgtgcgcggtctccaacaaagccctcccagcccccatcgagaaaaccatctccaaagccaaagggcagccccgagaaccacaggtgtacaccctgcccccatcccgggatgagctgaccaagaaccaggtcagcctgacctgcctggtcaaaggcttctatccaagcgacatcgccgtggagtgggagagcaatgggcagccggagaacaactacaagaccacgcctcccgtgctggactccgacggctccttcttcctctacagcaagctcaccgtggacaagagcaggtggcagcaggggaacgtcttctcatgctccgtgatgcatgaggctctgcacaaccactacacgcagaagagcctctccctgtctccgggtcagaggcacaacaattcttccctgaatacaagaactcagaaagcacgtcattctccgaattctgaagttcaattgttagagtctggtggcggtcttgttcagcctggtggttctttacgtctttcttgcgctgcttccggattcactttctctatttaccatatgaattgggttcgccaagctcctggtaaaggtttggagtgggtttctggtatctcttcttctggtggccgtactaattatgctgactccgttaaaggtcgcttcactatctctagagacaactctaagaatactctctacttgcagatgaacagcttaagggctgaggacacggccgtgtattactgtgcgagttcctaccgagcagctggttgggtggactactactacggtatggacgtctggggccaagggaccacggtcaccgtctcaagcggtggcggcggttcggggggtggcggaagtggaggtggagggagtcaagacatccagatgacccagtctccatcctccctgtctgcatttgtaggagacagagtcaccatcacttgccggacaagtcagagcgttgccacctatgtaaattggtatcagcagaaaccaggagaaggccctaagctcctgatctatgctgcatccagtttacaaagtggggtcccatcgaggttcagaggcagtggatctgggacagatttcactctcaccatcggcagtctgcaacctgaagattttgcaacttactactgtcaacagagttacagtgtgccaatcaccttcggccaagggacacgactggacattaaatgagcggccgc

SEQ ID NO: 687 - DNA, 2376 bp, Artificial Sequence
  Made in a lab
tggcttatcgaattaatacgactcactatagggagacccaagcttgccgccatggattttcaagtgcagattttcagcttcctgctaatcagtgcttcagtcataatgtcgcgaggattgcccgcccaggtggcatttacaccctacgccccggagcccgggagcacatgccggctcagagaatactatgaccagacagctcagatgtgctgcagcaaatgctcgccgggccaacatgcaaaagtcttctgtaccaagacctcggacaccgtgtgtgactcctgtgaggacagcacatacacccagctctggaactgggttcccgagtgcttgagctgtggctcccgctgtagctctgaccaggtggaaactcaagcctgcactcgggaacagaaccgcatctgcacctgcaggcccggctggtactgcgcgctgagcaagcaggaggggtgccggctgtgcgcgccgctgcgcaagtgccgcccgggcttcggcgtggccagaccaggaactgaaacatcagacgtggtgtgcaagccctgtgccccggggacgttctccaacacgacttcatccacggatatttgcaggccccaccagatctgtaacgtggtggccatccctgggaatgcaagcatggatgcagtctgcacgtccacgtcccccacccggagtatggccccaggggcagtacacttaccccagccagtgtccacacgatcccaacacacgcagccaactccagaacccagcactgctccaagcacctccttcctgctcccaatgggccccagccccccagctgaagggagcactggcgacaccggtgagcccaaatcttctgacaaaactcacacatgcccaccgtgcccagcacctgaagccgcgggtgcaccgtcagtcttcctcttccccccaaaacccaaggacaccctcatgatctcccggacccctgaggtcacatgcgtggtggtggacgtgagccacgaagaccctgaggtcaagttcaactggtacgtggacggcgtggaggtgcataatgccaagacaaagccgcgggaggagcagtacaacagcacgtaccgtgtggtcagcgtcctcaccgtcctgcaccaggactggctgaatggcaaggcgtacgcgtgcgcggtctccaacaaagccctcccagcccccatcgagaaaaccatctccaaagccaaagggcagccccgagaaccacaggtgtacaccctgcccccatcccgggatgagctgaccaagaaccaggtcagcctgacctgcctggtcaaaggcttctatccaagcgacatcgccgtggagtgggagagcaatgggcagccggagaacaactacaagaccacgcctcccgtgctggactccgacggctccttcttcctctacagcaagctcaccgtggacaagagcaggtggcagcaggggaacgtcttctcatgctccgtgatgcatgaggctctgcacaaccactacacgcagaagagcctctccctgtctccgggtcagaggcacaacaattcttccctgaatacaagaactcagaaagcacgtcattctccgaattctgaagttcaattgttagagtctggtggcggtcttgttcagcctggtggttctttacgtctttcttgcgctgcttccggattcactttctctctttacgatatgcattgggttcgccaagctcctggtaaaggtttggagtgggtttctcgtatctattcttctggtggcactactcagtatgctgactccgttaaaggtcgcttcactatctctagagacaactctaagaatactctctacttgcagatgaacagcttaagggctgaggacaccgccatgtattactgtgcaagagatccgggctatgggtcccaccactcctttgactactggggccagggaaccctggtcaccgtctcaagcggtggcggcggttcggggggtggcggaagtggaggtggagggagtcaagacatccagatgacccagtctccttccaccctgtctgcatctgtaggagacagagtcaccatcacttgccgggccagtcagagtatgagtaactggttggcctggtatcagcagaaaccagggaaagcccctaagctcctaatctatgatgtcttcactttgaaaagtggggtcccatcaaggttcagcggcagtagatctgggacagaattcactctcaccatcagcagcctgcagcctgatgactttgcaacttattactgccagcagtatagtgattattctgggatcactttcggccctgggaccgaagtggatatcagatgagcggccgcctcgagtctagagggccctattctatagtgtcacctaaatgctaga

SEQ ID NO: 688 - DNA, 2285 bp, Artificial Sequence
  Made in a lab
aagcttgccgccatggattttcaagtgcagattttcagcttcctgctaatcagtgcttcagtcataatgtcgcgaggattgcccgcccaggtggcatttacaccctacgccccggagcccgggagcacatgccggctcagagaatactatgaccagacagctcagatgtgctgcagcaaatgctcgccgggccaacatgcaaaagtcttctgtaccaagacctcggacaccgtgtgtgactcctgtgaggacagcacatacacccagctctggaactgggttcccgagtgcttgagctgtggctcccgctgtagctctgaccaggtggaaactcaagcctgcactcgggaacagaaccgcatctgcacctgcaggcccggctggtactgcgcgctgagcaagcaggaggggtgccggctgtgcgcgccgctgcgcaagtgccgcccgggcttcggcgtggccagaccaggaactgaaacatcagacgtggtgtgcaagccctgtgccccggggacgttctccaacacgacttcatccacggatatttgcaggccccaccagatctgtaacgtggtggccatccctgggaatgcaagcatggatgcagtctgcacgtccacgtcccccacccggagtatggccccaggggcagtacacttaccccagccagtgtccacacgatcccaacacacgcagccaactccagaacccagcactgctccaagcacctccttcctgctcccaatgggccccagccccccagctgaagggagcactggcgacaccggtgagcccaaatcttctgacaaaactcacacatgcccaccgtgcccagcacctgaagccgcgggtgcaccgtcagtcttcctcttccccccaaaacccaaggacaccctcatgatctcccggacccctgaggtcacatgcgtggtggtggacgtgagccacgaagaccctgaggtcaagttcaactggtacgtggacggcgtggaggtgcataatgccaagacaaagccgcgggaggagcagtacaacagcacgtaccgtgtggtcagcgtcctcaccgtcctgcaccaggactggctgaatggcaaggcgtacgcgtgcgcggtctccaacaaagccctcccagcccccatcgagaaaaccatctccaaagccaaagggcagccccgagaaccacaggtgtacaccctgcccccatcccgggatgagctgaccaagaaccaggtcagcctgacctgcctggtcaaaggcttctatccaagcgacatcgccgtggagtgggagagcaatgggcagccggagaacaactacaagaccacgcctcccgtgctggactccgacggctccttcttcctctacagcaagctcaccgtggacaagagcaggtggcagcaggggaacgtcttctcatgctccgtgatgcatgaggctctgcacaaccactacacgcagaagagcctctccctgtctccgggtcagaggcacaacaattcttccctgaatacaagaactcagaaagcacgtcattctccgaattctgaagttcaattgttagagtctggtggcggtcttgttcagcctggtggttctttacgtctttcttgcgctgcttccggattcactttctcttcttactatatgacttgggttcgacaagctcctggtaaaggtttggagtgggtttctggtatctattcttctggtggccctactcagtatgctgactccgttaaaggtcgcttcactatctctagagacaactctaagaatactctctacttgcagatgaacagcttaagggctgaggacacggccgtatattactgtgcgagagcggggggggatgcttttgatatctggggccaagggacaatggtcaccgtctcaagcggtggcggcggttcggggggtggcggaagtggaggtggagggagtcagagcgtcttgactcagccaccctcagcgtctgggacccccgggcagagggtcaccatctcttgttctggaagcagctccaacatcggaagtaaagttgtatactggtaccagcaggtaccaggaacggcccccaaactcctcatctataggaatgatcagcggccctcaggggtccctgaccggttctctggctccaagtctggcacctcagcctccctggccatcagtgggctccggtccgaggatgaggctgattattactgtgcagcatgggatgacagcctgagtggtcggtgggtgttcggcggagggaccaagctgaccgtcctatgagcggccgc

SEQ ID NO: 689 - DNA, 2361 bp, Artificial Sequence
  Made in a lab
ttttcgaattaatacgactcactatagggagacccaagcttgccgccatggattttcaagtgcagattttcagcttcctgctaatcagtgcttcagtcataatgtcgcgaggattgcccgcccaggtggcatttacaccctacgccccggagcccgggagcacatgccggctcagagaatactatgaccagacagctcagatgtgctgcagcaaatgctcgccgggccaacatgcaaaagtcttctgtaccaagacctcggacaccgtgtgtgactcctgtgaggacagcacatacacccagctctggaactgggttcccgagtgcttgagctgtggctcccgctgtagctctgaccaggtggaaactcaagcctgcactcgggaacagaaccgcatctgcacctgcaggcccggctggtactgcgcgctgagcaagcaggaggggtgccggctgtgcgcgccgctgcgcaagtgccgcccgggcttcggcgtggccagaccaggaactgaaacatcagacgtggtgtgcaagccctgtgccccggggacgttctccaacacgacttcatccacggatatttgcaggccccaccagatctgtaacgtggtggccatccctgggaatgcaagcatggatgcagtctgcacgtccacgtcccccacccggagtatggccccaggggcagtacacttaccccagccagtgtccacacgatcccaacacacgcagccaactccagaacccagcactgctccaagcacctccttcctgctcccaatgggccccagccccccagctgaagggagcactggcgacaccggtgagcccaaatcttctgacaaaactcacacatgcccaccgtgcccagcacctgaagccgcgggtgcaccgtcagtcttcctcttccccccaaaacccaaggacaccctcatgatctcccggacccctgaggtcacatgcgtggtggtggacgtgagccacgaagaccctgaggtcaagttcaactggtacgtggacggcgtggaggtgcataatgccaagacaaagccgcgggaggagcagtacaacagcacgtaccgtgtggtcagcgtcctcaccgtcctgcaccaggactggctgaatggcaaggcgtacgcgtgcgcggtctccaacaaagccctcccagcccccatcgagaaaaccatctccaaagccaaagggcagccccgagaaccacaggtgtacaccctgcccccatcccgggatgagctgaccaagaaccaggtcagcctgacctgcctggtcaaaggcttctatccaagcgacatcgccgtggagtgggagagcaatgggcagccggagaacaactacaagaccacgcctcccgtgctggactccgacggctccttcttcctctacagcaagctcaccgtggacaagagcaggtggcagcaggggaacgtcttctcatgctccgtgatgcatgaggctctgcacaaccactacacgcagaagagcctctccctgtctccgggtcagaggcacaacaattcttccctgaatacaagaactcagaaagcacgtcattctccgaattctgaagttcaattgttagagtctggtggcggtcttgttcagcctggtggttctttacgtctttcttgcgctgcttccggattcactttctcttcttacgagatgttttgggttcgccaagctcctggtaaaggtttggagtgggtttcttctatctctccttctggtggctatacttattatgctgactccgttaaaggtcgcttcactatctctagagacaactctaagaatactctctacttgcagatgaacagcttaagggctgaggacacggccgtgtattactgtgcgacaatgactactagtggttttcatctaatctggggccaagggacaatggtcaccgtctcaagcggtggcggcggttcggggggtggcggaagtggaggtggagggagtcaagacatccagatgacccagtctccagccaccctgtctgcatctgtaggagacagagtcaccatcacttgccgggccagtcagagtattagtagctggttggcctggtatcagcagaaaccagggaaagcccctaagctcctgatctataaggcgtctggtttagaaagtggggtcccatcaaggttcagcggcagtggatctgggacagaattcactctcaccatcagcagcctgcagcctgatgattttgcaacttattactgccaacagtataatagttatccattcactttcggccctgggactaaagtggatatcaagtgagcggccgcctcgagtctagagggccctattctatagtgtcacctaaatgctagag

SEQ ID NO: 690 - DNA, 2276 bp, Artificial Sequence
  Made in a lab
aagcttgccgccatggattttcaagtgcagattttcagcttcctgctaatcagtgcttcagtcataatgtcgcgaggattgcccgcccaggtggcatttacaccctacgccccggagcccgggagcacatgccggctcagagaatactatgaccagacagctcagatgtgctgcagcaaatgctcgccgggccaacatgcaaaagtcttctgtaccaagacctcggacaccgtgtgtgactcctgtgaggacagcacatacacccagctctggaactgggttcccgagtgcttgagctgtggctcccgctgtagctctgaccaggtggaaactcaagcctgcactcgggaacagaaccgcatctgcacctgcaggcccggctggtactgcgcgctgagcaagcaggaggggtgccggctgtgcgcgccgctgcgcaagtgccgcccgggcttcggcgtggccagaccaggaactgaaacatcagacgtggtgtgcaagccctgtgccccggggacgttctccaacacgacttcatccacggatatttgcaggccccaccagatctgtaacgtggtggccatccctgggaatgcaagcatggatgcagtctgcacgtccacgtcccccacccggagtatggccccaggggcagtacacttaccccagccagtgtccacacgatcccaacacacgcagccaactccagaacccagcactgctccaagcacctccttcctgctcccaatgggccccagccccccagctgaagggagcactggcgacaccggtgagcccaaatcttctgacaaaactcacacatgcccaccgtgcccagcacctgaagccgcgggtgcaccgtcagtcttcctcttccccccaaaacccaaggacaccctcatgatctcccggacccctgaggtcacatgcgtggtggtggacgtgagccacgaagaccctgaggtcaagttcaactggtacgtggacggcgtggaggtgcataatgccaagacaaagccgcgggaggagcagtacaacagcacgtaccgtgtggtcagcgtcctcaccgtcctgcaccaggactggctgaatggcaaggcgtacgcgtgcgcggtctccaacaaagccctcccagcccccatcgagaaaaccatctccaaagccaaagggcagccccgagaaccacaggtgtacaccctgcccccatcccgggatgagctgaccaagaaccaggtcagcctgacctgcctggtcaaaggcttctatccaagcgacatcgccgtggagtgggagagcaatgggcagccggagaacaactacaagaccacgcctcccgtgctggactccgacggctccttcttcctctacagcaagctcaccgtggacaagagcaggtggcagcaggggaacgtcttctcatgctccgtgatgcatgaggctctgcacaaccactacacgcagaagagcctctccctgtctccgggtcagaggcacaacaattcttccctgaatacaagaactcagaaagcacgtcattctccgaattctgaagttcaattgttagagtctggtggcggtcttgttcagcctggtggttctttacgtctttcttgcgctgcttccggattcactttctctgattaccctatgcagtgggttcgccaagctcctggtaaaggtttggagtgggtttcttggatcggtccttctggtggctggactgtttatgctgactccgttaaaggtcgcttcactatctctagagacaactctaagaatactctctacttgcagatgaacagcttaagggctgaggacacggccgtgtattactgtgcgagggatgacggaattgctggattcctatggggccagggcaccctggtcaccgtctcaagcggtggcggcggttcggggggtggcggaagtggaggtggagggagtcaagacatccagatgacccagtctccactctccctgtctgcatctgtaggagacagagtcaccatcacttgccaggcgagtcgagacattagtatctatttaaattggtatcagcagaaaccagggaaagttcctaagctcctgatctttggtgcgtccactttgcgatcaggggtcccatctcggttcagtggcagtggatctgggacagatttcactctcaccatcaccagcctgcagcctgaagatgttgcaacttattactgtcaaaagtataacagtgccccgtacacttttggcccggggaccaaggtcgagatcagatgagcggccgc

SEQ ID NO: 691 - DNA, 2300 bp, Artificial Sequence
  Made in a lab
aagcttgccgccatggattttcaagtgcagattttcagcttcctgctaatcagtgcttcagtcataatgtcgcgaggattgcccgcccaggtggcatttacaccctacgccccggagcccgggagcacatgccggctcagagaatactatgaccagacagctcagatgtgctgcagcaaatgctcgccgggccaacatgcaaaagtcttctgtaccaagacctcggacaccgtgtgtgactcctgtgaggacagcacatacacccagctctggaactgggttcccgagtgcttgagctgtggctcccgctgtagctctgaccaggtggaaactcaagcctgcactcgggaacagaaccgcatctgcacctgcaggcccggctggtactgcgcgctgagcaagcaggaggggtgccggctgtgcgcgccgctgcgcaagtgccgcccgggcttcggcgtggccagaccaggaactgaaacatcagacgtggtgtgcaagccctgtgccccggggacgttctccaacacgacttcatccacggatatttgcaggccccaccagatctgtaacgtggtggccatccctgggaatgcaagcatggatgcagtctgcacgtccacgtcccccacccggagtatggccccaggggcagtacacttaccccagccagtgtccacacgatcccaacacacgcagccaactccagaacccagcactgctccaagcacctccttcctgctcccaatgggccccagccccccagctgaagggagcactggcgacaccggtgagcccaaatcttctgacaaaactcacacatgcccaccgtgcccagcacctgaagccgcgggtgcaccgtcagtcttcctcttccccccaaaacccaaggacaccctcatgatctcccggacccctgaggtcacatgcgtggtggtggacgtgagccacgaagaccctgaggtcaagttcaactggtacgtggacggcgtggaggtgcataatgccaagacaaagccgcgggaggagcagtacaacagcacgtaccgtgtggtcagcgtcctcaccgtcctgcaccaggactggctgaatggcaaggcgtacgcgtgcgcggtctccaacaaagccctcccagcccccatcgagaaaaccatctccaaagccaaagggcagccccgagaaccacaggtgtacaccctgcccccatcccgggatgagctgaccaagaaccaggtcagcctgacctgcctggtcaaaggcttctatccaagcgacatcgccgtggagtgggagagcaatgggcagccggagaacaactacaagaccacgcctcccgtgctggactccgacggctccttcttcctctacagcaagctcaccgtggacaagagcaggtggcagcaggggaacgtcttctcatgctccgtgatgcatgaggctctgcacaaccactacacgcagaagagcctctccctgtctccgggtcagaggcacaacaattcttccctgaatacaagaactcagaaagcacgtcattctccgaattctgaagttcaattgttagagtctggtggcggtcttgttcagcctggtggttctttacgtctttcttgcgctgcttccggattcactttctcttggtaccttatgcattgggttcgccaagctcctggtaaaggtttggagtgggtttctggtatctggccttctggtggccatactctttatgctgactccgttaaaggtcgcttcactatctctagagacaactctaagaatactctctacttgcagatgaacagcttaagggctgaggacacggccgtgtattactgtgcgagagagccgttactatggttcggggagttatcgtacaactggttcgacccctggggccagggcaccctggtcaccgtctcaagcggtggcggcggttcggggggtggcggaagtggaggtggagggagtcaagacatccagatgacccagtctccatcttccgtgtctgcatctgtaggagacagagtcaccatcacttgtcgggcgagtcagggtattagcagctggttagcctggtatcagcagaaaccagggaaagcccctaagctcctgatctatgctgcatccagtttgcaaagtggggtcccatcaaggttcagcggcagtggatctgggacagatttcactctcaccatcagcagcctgcagcctgaagattttgcaacttactattgtcaacaggctaacagtttccctctcactttcggcggagggaccaaggtggagatcaaatgagcggccgc

SEQ ID NO: 692 - DNA, 2294 bp, Artificial Sequence
  Made in a lab
aagcttgccgccatggattttcaagtgcagattttcagcttcctgctaatcagtgcttcagtcataatgtcgcgaggattgcccgcccaggtggcatttacaccctacgccccggagcccgggagcacatgccggctcagagaatactatgaccagacagctcagatgtgctgcagcaaatgctcgccgggccaacatgcaaaagtcttctgtaccaagacctcggacaccgtgtgtgactcctgtgaggacagcacatacacccagctctggaactgggttcccgagtgcttgagctgtggctcccgctgtagctctgaccaggtggaaactcaagcctgcactcgggaacagaaccgcatctgcacctgcaggcccggctggtactgcgcgctgagcaagcaggaggggtgccggctgtgcgcgccgctgcgcaagtgccgcccgggcttcggcgtggccagaccaggaactgaaacatcagacgtggtgtgcaagccctgtgccccggggacgttctccaacacgacttcatccacggatatttgcaggccccaccagatctgtaacgtggtggccatccctgggaatgcaagcatggatgcagtctgcacgtccacgtcccccacccggagtatggccccaggggcagtacacttaccccagccagtgtccacacgatcccaacacacgcagccaactccagaacccagcactgctccaagcacctccttcctgctcccaatgggccccagccccccagctgaagggagcactggcgacaccggtgagcccaaatcttctgacaaaactcacacatgcccaccgtgcccagcacctgaagccgcgggtgcaccgtcagtcttcctcttccccccaaaacccaaggacaccctcatgatctcccggacccctgaggtcacatgcgtggtggtggacgtgagccacgaagaccctgaggtcaagttcaactggtacgtggacggcgtggaggtgcataatgccaagacaaagccgcgggaggagcagtacaacagcacgtaccgtgtggtcagcgtcctcaccgtcctgcaccaggactggctgaatggcaaggcgtacgcgtgcgcggtctccaacaaagccctcccagcccccatcgagaaaaccatctccaaagccaaagggcagccccgagaaccacaggtgtacaccctgcccccatcccgggatgagctgaccaagaaccaggtcagcctgacctgcctggtcaaaggcttctatccaagcgacatcgccgtggagtgggagagcaatgggcagccggagaacaactacaagaccacgcctcccgtgctggactccgacggctccttcttcctctacagcaagctcaccgtggacaagagcaggtggcagcaggggaacgtcttctcatgctccgtgatgcatgaggctctgcacaaccactacacgcagaagagcctctccctgtctccgggtcagaggcacaacaattcttccctgaatacaagaactcagaaagcacgtcattctccgaattctgaagttcaattgttagagtctggtggcggtcttgttcagcctggtggttctttacgtctttcttgcgctgcttccggattcactttctcttattacgagaatatggcttgggttcgccaagctcctggtaaaggtttggagtgggtttctggtatctatccttctggtggccttacttattatgctgactccgttaaaggtcgcttcactatctctagagacaactctaagaatactctctacttgcagatgaacagcttaagggctgaggacacggccgtgtattactgtgcgagatccaggaggtactatgatagtagtgatgcttttgatatctggggccaagggacaatggtcaccgtctcaagcggtggcggcggttcggggggtggcggaagtggaggtggagggagtcaagacatccagatgacccagtctccagccaccctgtctttgtctccaggggaaagagccaccctctcctgcagggccagtcagagtattaacacctacttagcctggtatcagcagaagcctggccaccctcccaggctcctcatttatgatgcatccaacagggccactggcatcccagacaggttcagtggcagtgggtctgggacagacttcactctcaccatcagcagactggagcctgaagattttgtagtgtattactgtcagcagtatggtaggtcacggtacacttttggccaggggaccaagctggagatcaaatgagcggccgc

SEQ ID NO: 693 - DNA, 2294 bp, Artificial Sequence
  Made in a lab
aagcttgccgccatggattttcaagtgcagattttcagcttcctgctaatcagtgcttcagtcataatgtcgcgaggattgcccgcccaggtggcatttacaccctacgccccggagcccgggagcacatgccggctcagagaatactatgaccagacagctcagatgtgctgcagcaaatgctcgccgggccaacatgcaaaagtcttctgtaccaagacctcggacaccgtgtgtgactcctgtgaggacagcacatacacccagctctggaactgggttcccgagtgcttgagctgtggctcccgctgtagctctgaccaggtggaaactcaagcctgcactcgggaacagaaccgcatctgcacctgcaggcccggctggtactgcgcgctgagcaagcaggaggggtgccggctgtgcgcgccgctgcgcaagtgccgcccgggcttcggcgtggccagaccaggaactgaaacatcagacgtggtgtgcaagccctgtgccccggggacgttctccaacacgacttcatccacggatatttgcaggccccaccagatctgtaacgtggtggccatccctgggaatgcaagcatggatgcagtctgcacgtccacgtcccccacccggagtatggccccaggggcagtacacttaccccagccagtgtccacacgatcccaacacacgcagccaactccagaacccagcactgctccaagcacctccttcctgctcccaatgggccccagccccccagctgaagggagcactggcgacaccggtgagcccaaatcttctgacaaaactcacacatgcccaccgtgcccagcacctgaagccgcgggtgcaccgtcagtcttcctcttccccccaaaacccaaggacaccctcatgatctcccggacccctgaggtcacatgcgtggtggtggacgtgagccacgaagaccctgaggtcaagttcaactggtacgtggacggcgtggaggtgcataatgccaagacaaagccgcgggaggagcagtacaacagcacgtaccgtgtggtcagcgtcctcaccgtcctgcaccaggactggctgaatggcaaggcgtacgcgtgcgcggtctccaacaaagccctcccagcccccatcgagaaaaccatctccaaagccaaagggcagccccgagaaccacaggtgtacaccctgcccccatcccgggatgagctgaccaagaaccaggtcagcctgacctgcctggtcaaaggcttctatccaagcgacatcgccgtggagtgggagagcaatgggcagccggagaacaactacaagaccacgcctcccgtgctggactccgacggctccttcttcctctacagcaagctcaccgtggacaagagcaggtggcagcaggggaacgtcttctcatgctccgtgatgcatgaggctctgcacaaccactacacgcagaagagcctctccctgtctccgggtcagaggcacaacaattcttccctgaatacaagaactcagaaagcacgtcattctccgaattctgaagttcaattgttagagtctggtggcggtcttgttcagcctggtggttctttacgtctttcttgcgctgcttccggattcactttctctacttacgttatgtattgggttcgccaagctcctggtaaaggtttggagtgggtttctggtatcggtccttctggtggcaatactttttatgctgactccgttaaaggtcgcttcactatctctagagacaactctaagaatactctctacttgcagatgaacagcttaagggctgaggacacggccgtgtgttactgtgcgagagacccaggggatttttggagtggttactacggtatggacgtctggggccaagggaccacggtcaccgtctcaagcggtggcggcggttcggggggtggcggaagtggaggtggagggagtcaagacatccagatgacccagtctccatcctccctgtctgcatctgtaggagacagagtcaccatcacttgccgggcgagtcagggcattagcaattatttagcctggtatcagcagaaaccagggaaagttcctaagctcctgatcaatgctgcatccactttgcaatcaggggtcccatctcggttcagtggcagtggatctgggacagaattcactctcaccatcagcagtctgcaacctgaagattttgcaacttactactgtcaacagagtgacaatattccgtacacttttggcctggggaccaaactggagatcaaatgagcggccgc

SEQ ID NO: 694 - DNA, 2297 bp, Artificial Sequence
  Made in a lab
aagcttgccgccatggattttcaagtgcagattttcagcttcctgctaatcagtgcttcagtcataatgtcgcgaggattgcccgcccaggtggcatttacaccctacgccccggagcccgggagcacatgccggctcagagaatactatgaccagacagctcagatgtgctgcagcaaatgctcgccgggccaacatgcaaaagtcttctgtaccaagacctcggacaccgtgtgtgactcctgtgaggacagcacatacacccagctctggaactgggttcccgagtgcttgagctgtggctcccgctgtagctctgaccaggtggaaactcaagcctgcactcgggaacagaaccgcatctgcacctgcaggcccggctggtactgcgcgctgagcaagcaggaggggtgccggctgtgcgcgccgctgcgcaagtgccgcccgggcttcggcgtggccagaccaggaactgaaacatcagacgtggtgtgcaagccctgtgccccggggacgttctccaacacgacttcatccacggatatttgcaggccccaccagatctgtaacgtggtggccatccctgggaatgcaagcatggatgcagtctgcacgtccacgtcccccacccggagtatggccccaggggcagtacacttaccccagccagtgtccacacgatcccaacacacgcagccaactccagaacccagcactgctccaagcacctccttcctgctcccaatgggccccagccccccagctgaagggagcactggcgacaccggtgagcccaaatcttctgacaaaactcacacatgcccaccgtgcccagcacctgaagccgcgggtgcaccgtcagtcttcctcttccccccaaaacccaaggacaccctcatgatctcccggacccctgaggtcacatgcgtggtggtggacgtgagccacgaagaccctgaggtcaagttcaactggtacgtggacggcgtggaggtgcataatgccaagacaaagccgcgggaggagcagtacaacagcacgtaccgtgtggtcagcgtcctcaccgtcctgcaccaggactggctgaatggcaaggcgtacgcgtgcgcggtctccaacaaagccctcccagcccccatcgagaaaaccatctccaaagccaaagggcagccccgagaaccacaggtgtacaccctgcccccatcccgggatgagctgaccaagaaccaggtcagcctgacctgcctggtcaaaggcttctatccaagcgacatcgccgtggagtgggagagcaatgggcagccggagaacaactacaagaccacgcctcccgtgctggactccgacggctccttcttcctctacagcaagctcaccgtggacaagagcaggtggcagcaggggaacgtcttctcatgctccgtgatgcatgaggctctgcacaaccactacacgcagaagagcctctccctgtctccgggtcagaggcacaacaattcttccctgaatacaagaactcagaaagcacgtcattctccgaattctgaagttcaattgttagagtctggtggcggtcttgttcagcctggtggttctttacgtctttcttgcgctgcttccggattcactttctctttttacggtatggcttgggttcgccaagctcctggtaaaggtttggagtgggtttcttctatctatccttctggtggctatactgattatgctgactccgttaaaggtcgcttcactatctctagagacaactctaagaatactctctacttgcagatgaacagcttaagggctgaggacacggccgtgtattactgtgcgagatccgcgggaggctggatcggggggggtgcttttgatatctggggccaagggacaatggtcaccgtctcaagcggtggcggcggttcggggggtggcggaagtggaggtggagggagtcagagcgaattgactcagccaccctcagcgtctgggacccccgggcagagggtcaccatctcttgttctggaagcagctccaacatcggaagtaatactgtaaactggtaccagcagctcccaggaacggcccccaaactcctcatctatagtaataatcagcggccctcaggggtccctgaccgattctctggctccaagtctggcacctcagcctccctggccatcagtgggctccagtctgaggatgaggctgattattactgtgcagcatgggatgacagcctgaatggttatgtcttcggaattgggaccaaggtcaccgtcctatgagcggccgc

SEQ ID NO: 695 - DNA, 2303 bp, Artificial Sequence
  Made in a lab
aagcttgccgccatggattttcaagtgcagattttcagcttcctgctaatcagtgcttcagtcataatgtcgcgaggattgcccgcccaggtggcatttacaccctacgccccggagcccgggagcacatgccggctcagagaatactatgaccagacagctcagatgtgctgcagcaaatgctcgccgggccaacatgcaaaagtcttctgtaccaagacctcggacaccgtgtgtgactcctgtgaggacagcacatacacccagctctggaactgggttcccgagtgcttgagctgtggctcccgctgtagctctgaccaggtggaaactcaagcctgcactcgggaacagaaccgcatctgcacctgcaggcccggctggtactgcgcgctgagcaagcaggaggggtgccggctgtgcgcgccgctgcgcaagtgccgcccgggcttcggcgtggccagaccaggaactgaaacatcagacgtggtgtgcaagccctgtgccccggggacgttctccaacacgacttcatccacggatatttgcaggccccaccagatctgtaacgtggtggccatccctgggaatgcaagcatggatgcagtctgcacgtccacgtcccccacccggagtatggccccaggggcagtacacttaccccagccagtgtccacacgatcccaacacacgcagccaactccagaacccagcactgctccaagcacctccttcctgctcccaatgggccccagccccccagctgaagggagcactggcgacaccggtgagcccaaatcttctgacaaaactcacacatgcccaccgtgcccagcacctgaagccgcgggtgcaccgtcagtcttcctcttccccccaaaacccaaggacaccctcatgatctcccggacccctgaggtcacatgcgtggtggtggacgtgagccacgaagaccctgaggtcaagttcaactggtacgtggacggcgtggaggtgcataatgccaagacaaagccgcgggaggagcagtacaacagcacgtaccgtgtggtcagcgtcctcaccgtcctgcaccaggactggctgaatggcaaggcgtacgcgtgcgcggtctccaacaaagccctcccagcccccatcgagaaaaccatctccaaagccaaagggcagccccgagaaccacaggtgtacaccctgcccccatcccgggatgagctgaccaagaaccaggtcagcctgacctgcctggtcaaaggcttctatccaagcgacatcgccgtggagtgggagagcaatgggcagccggagaacaactacaagaccacgcctcccgtgctggactccgacggctccttcttcctctacagcaagctcaccgtggacaagagcaggtggcagcaggggaacgtcttctcatgctccgtgatgcatgaggctctgcacaaccactacacgcagaagagcctctccctgtctccgggtcagaggcacaacaattcttccctgaatacaagaactcagaaagcacgtcattctccgaattctgaagttcaattgttagagtctggtggcggtcttgttcagcctggtggttctttacgtctttcttgcgctgcttccggattcactttctctaagtaccctatgatgtgggttcgccaagctcctggtaaaggtttggagtgggtttcttatatctatccttctggtggcaagactgcttatgctgactccgttaaaggtcgcttcactatctctagagacaactctaagaatactctctacttgcagatgaacagcttaagggctgaggacacggccgtgtattactgtgccacctatggttcagggagttattacctttactactactactactacatggacgtctggggcaaagggaccacggtcaccgtctcaagcggtggcggcggttcggggggtggcggaagtggaggtggagggagtcaagacatccagatgacccagtctccatcctccctgtctgcatctgtgggagacagtgtcaccatcgcttgccgggctagtcagagcattagcacctatttaaattggtatcagcagaaaccagggcaagcccctaagctcctgatctatgaagcaaccaatttgcaaagtggggtcccatcaaggttcagcggcagtggatctgggacagatttcactctcaccatcagcagcctgcagcctgaagatgttgcaacttactactgtcagcaggctaacaatttcccattcactttcggccctgggaccaaagtggatatcaaatgagcggccgc

SEQ ID NO: 696 - DNA, 2306 bp, Artificial Sequence
  Made in a lab
aagcttgccgccatggattttcaagtgcagattttcagcttcctgctaatcagtgcttcagtcataatgtcgcgaggattgcccgcccaggtggcatttacaccctacgccccggagcccgggagcacatgccggctcagagaatactatgaccagacagctcagatgtgctgcagcaaatgctcgccgggccaacatgcaaaagtcttctgtaccaagacctcggacaccgtgtgtgactcctgtgaggacagcacatacacccagctctggaactgggttcccgagtgcttgagctgtggctcccgctgtagctctgaccaggtggaaactcaagcctgcactcgggaacagaaccgcatctgcacctgcaggcccggctggtactgcgcgctgagcaagcaggaggggtgccggctgtgcgcgccgctgcgcaagtgccgcccgggcttcggcgtggccagaccaggaactgaaacatcagacgtggtgtgcaagccctgtgccccggggacgttctccaacacgacttcatccacggatatttgcaggccccaccagatctgtaacgtggtggccatccctgggaatgcaagcatggatgcagtctgcacgtccacgtcccccacccggagtatggccccaggggcagtacacttaccccagccagtgtccacacgatcccaacacacgcagccaactccagaacccagcactgctccaagcacctccttcctgctcccaatgggccccagccccccagctgaagggagcactggcgacaccggtgagcccaaatcttctgacaaaactcacacatgcccaccgtgcccagcacctgaagccgcgggtgcaccgtcagtcttcctcttccccccaaaacccaaggacaccctcatgatctcccggacccctgaggtcacatgcgtggtggtggacgtgagccacgaagaccctgaggtcaagttcaactggtacgtggacggcgtggaggtgcataatgccaagacaaagccgcgggaggagcagtacaacagcacgtaccgtgtggtcagcgtcctcaccgtcctgcaccaggactggctgaatggcaaggcgtacgcgtgcgcggtctccaacaaagccctcccagcccccatcgagaaaaccatctccaaagccaaagggcagccccgagaaccacaggtgtacaccctgcccccatcccgggatgagctgaccaagaaccaggtcagcctgacctgcctggtcaaaggcttctatccaagcgacatcgccgtggagtgggagagcaatgggcagccggagaacaactacaagaccacgcctcccgtgctggactccgacggctccttcttcctctacagcaagctcaccgtggacaagagcaggtggcagcaggggaacgtcttctcatgctccgtgatgcatgaggctctgcacaaccactacacgcagaagagcctctccctgtctccgggtcagaggcacaacaattcttccctgaatacaagaactcagaaagcacgtcattctccgaattctgaagttcaattgttagagtctggtggcggtcttgttcagcctggtggttctttacgtctttcttgcgctgcttccggattcactttctcttggtactctatgtggtgggttcgccaagctcctggtaaaggtttggagtgggtttcttatatcgttccttctggtggcgagactatttatgctgactccgttaaaggtcgcttcactatctctagagacaactctaagaatactctctacttgcagatgaacagcttaagggctgaggacacggccgtgtattactgtgcgaaaaaccttggtgaaggattttggagtgattattaccctccgcttgactactggggccagggaaccctggtcaccgtctcaagcggtggcggcggttcggggggtggcggaagtggaggtggagggagtcagagcgtcttgactcagccaccctcagcgtctgggacccccgggcagagggtcaccatctcttgttctggaagcagctccaacatcggaggtaatgctgtaaactggtaccagcagctcccgggaacggcccccaaactcgtcctctatagtagtaatcaccggccctcaggggtccctgaccgattctctggctccaggtctggcacctcagcctccctggccatcagtgggctccagtctcaggatgaggctgattactactgtgcagcatgggatgacagcctgaatggtccgctcttcggcggagggaccaagytgaccgtcctatgagcggccgc

SEQ ID NO: 697 - DNA, 2279 bp, Artificial Sequence
  Made in a lab
aagcttgccgccatggattttcaagtgcagattttcagcttcctgctaatcagtgcttcagtcataatgtcgcgaggattgcccgcccaggtggcatttacaccctacgccccggagcccgggagcacatgccggctcagagaatactatgaccagacagctcagatgtgctgcagcaaatgctcgccgggccaacatgcaaaagtcttctgtaccaagacctcggacaccgtgtgtgactcctgtgaggacagcacatacacccagctctggaactgggttcccgagtgcttgagctgtggctcccgctgtagctctgaccaggtggaaactcaagcctgcactcgggaacagaaccgcatctgcacctgcaggcccggctggtactgcgcgctgagcaagcaggaggggtgccggctgtgcgcgccgctgcgcaagtgccgcccgggcttcggcgtggccagaccaggaactgaaacatcagacgtggtgtgcaagccctgtgccccggggacgttctccaacacgacttcatccacggatatttgcaggccccaccagatctgtaacgtggtggccatccctgggaatgcaagcatggatgcagtctgcacgtccacgtcccccacccggagtatggccccaggggcagtacacttaccccagccagtgtccacacgatcccaacacacgcagccaactccagaacccagcactgctccaagcacctccttcctgctcccaatgggccccagccccccagctgaagggagcactggcgacaccggtgagcccaaatcttctgacaaaactcacacatgcccaccgtgcccagcacctgaagccgcgggtgcaccgtcagtcttcctcttccccccaaaacccaaggacaccctcatgatctcccggacccctgaggtcacatgcgtggtggtggacgtgagccacgaagaccctgaggtcaagttcaactggtacgtggacggcgtggaggtgcataatgccaagacaaagccgcgggaggagcagtacaacagcacgtaccgtgtggtcagcgtcctcaccgtcctgcaccaggactggctgaatggcaaggcgtacgcgtgcgcggtctccaacaaagccctcccagcccccatcgagaaaaccatctccaaagccaaagggcagccccgagaaccacaggtgtacaccctgcccccatcccgggatgagctgaccaagaaccaggtcagcctgacctgcctggtcaaaggcttctatccaagcgacatcgccgtggagtgggagagcaatgggcagccggagaacaactacaagaccacgcctcccgtgctggactccgacggctccttcttcctctacagcaagctcaccgtggacaagagcaggtggcagcaggggaacgtcttctcatgctccgtgatgcatgaggctctgcacaaccactacacgcagaagagcctctccctgtctccgggtcagaggcacaacaattcttccctgaatacaagaactcagaaagcacgtcattctccgaattctgaagttcaattgttagagtctggtggcggtcttgttcagcctggtggttctttacgtctttcttgcgctgcttccggattcactttctctcattacggtatgcattgggttcgccaagctcctggtaaaggtttggagtgggtttcttctatctatcctggcatgactcagtatgctgactccgttaaaggtcgcttcactatctctagagacaactctaagaatactctctacttgcagatgaacagcttaagggctgaggacacggccgtgtattactgtgcgagagatcggggttcggggattgatgcttttgatatctggggccaagggacaatggtcaccgtctcaagcggtggcggcggttcggggggtggcggaagtggaggtggagggagtcagagcgaattgactcagccaccctcagtgtccgtgtccccaggacagacggccaccgtcagctgctctggagaaaaattgggggatagatatgcctggtggtatcaacagaaggcaggccagtcccctgtgctggtcatctatcaagataccaagcggccctcaggggtccctgaccgattctctggctccaactctggcacctcagcctccctggtcatcagtggaccccagtctgaggatgaggctgattattactgtgcagcatgggatgacagcctgaagggtgtggtattcggcggagggtccaagctgaccgtcctatgagcggccgc

SEQ ID NO: 698 - DNA, 2306 bp, Artificial Sequence
  Made in a lab
aagcttgccgccatggattttcaagtgcagattttcagcttcctgctaatcagtgcttcagtcataatgtcgcgaggattgcccgcccaggtggcatttacaccctacgccccggagcccgggagcacatgccggctcagagaatactatgaccagacagctcagatgtgctgcagcaaatgctcgccgggccaacatgcaaaagtcttctgtaccaagacctcggacaccgtgtgtgactcctgtgaggacagcacatacacccagctctggaactgggttcccgagtgcttgagctgtggctcccgctgtagctctgaccaggtggaaactcaagcctgcactcgggaacagaaccgcatctgcacctgcaggcccggctggtactgcgcgctgagcaagcaggaggggtgccggctgtgcgcgccgctgcgcaagtgccgcccgggcttcggcgtggccagaccaggaactgaaacatcagacgtggtgtgcaagccctgtgccccggggacgttctccaacacgacttcatccacggatatttgcaggccccaccagatctgtaacgtggtggccatccctgggaatgcaagcatggatgcagtctgcacgtccacgtcccccacccggagtatggccccaggggcagtacacttaccccagccagtgtccacacgatcccaacacacgcagccaactccagaacccagcactgctccaagcacctccttcctgctcccaatgggccccagccccccagctgaagggagcactggcgacaccggtgagcccaaatcttctgacaaaactcacacatgcccaccgtgcccagcacctgaagccgcgggtgcaccgtcagtcttcctcttccccccaaaacccaaggacaccctcatgatctcccggacccctgaggtcacatgcgtggtggtggacgtgagccacgaagaccctgaggtcaagttcaactggtacgtggacggcgtggaggtgcataatgccaagacaaagccgcgggaggagcagtacaacagcacgtaccgtgtggtcagcgtcctcaccgtcctgcaccaggactggctgaatggcaaggcgtacgcgtgcgcggtctccaacaaagccctcccagcccccatcgagaaaaccatctccaaagccaaagggcagccccgagaaccacaggtgtacaccctgcccccatcccgggatgagctgaccaagaaccaggtcagcctgacctgcctggtcaaaggcttctatccaagcgacatcgccgtggagtgggagagcaatgggcagccggagaacaactacaagaccacgcctcccgtgctggactccgacggctccttcttcctctacagcaagctcaccgtggacaagagcaggtggcagcaggggaacgtcttctcatgctccgtgatgcatgaggctctgcacaaccactacacgcagaagagcctctccctgtctccgggtcagaggcacaacaattcttccctgaatacaagaactcagaaagcacgtcattctccgaattctgaagttcaattgttagagtctggtggcggtcttgttcagcctggtggttctttacgtctttcctgcgctgcttccggattcactttctcttggtacgatatgctttgggttcgccaagctcctggtaaaggtttggagtgggtttctgttatctccccttctggtggccgtactttttatgctgactccgttaaaggtcgcttcactatctctagagacaactctaagaatactctctacttgcagatgaacagcttaagggctgaggacacggccgtgtattactgtgcggttactcgatcgatgtatagcagcagctggtacggggcccccccgactcactggggccagggcaccctggtcaccgtctcaagcggtggcggcggttcggggggtggcggaagtggaggtggagggagtcagagcgaattgactcagccaccctcagcgtctgggacccccgggcagagggtcaccatctcttgttctggaaggagctccaacatcggaagtaatagtgtaaactggtaccagcagctcccaggaacggcccccaaactcctcatctatagtaataatcaccggccctcaggggtccctgaccgattctctggctccaagtctggcacctcagcctccctggccatcagtgggctccagtctgaggatgaggctgattattactgtgcagcatgggatgacagcctgtatcaaggagtgttcggcggagggaccaagctgaccgtcctatgagcggccgc

SEQ ID NO: 699 - DNA, 2371 bp, Artificial Sequence
  Made in a lab
tggcttatcgaattaatacgactcactatagggagacccaagcttgccgccatggattttcaagtgcagattttcagcttcctgctaatcagtgcttcagtcataatgtcgcgaggattgcccgcccaggtggcatttacaccctacgccccggagcccgggagcacatgccggctcagagaatactatgaccagacagctcagatgtgctgcagcaaatgctcgccgggccaacatgcaaaagtcttctgtaccaagacctcggacaccgtgtgtgactcctgtgaggacagcacatacacccagctctggaactgggttcccgagtgcttgagctgtggctcccgctgtagctctgaccaggtggaaactcaagcctgcactcgggaacagaaccgcatctgcacctgcaggcccggctggtactgcgcgctgagcaagcaggaggggtgccggctgtgcgcgccgctgcgcaagtgccgcccgggcttcggcgtggccagaccaggaactgaaacatcagacgtggtgtgcaagccctgtgccccggggacgttctccaacacgacttcatccacggatatttgcaggccccaccagatctgtaacgtggtggccatccctgggaatgcaagcatggatgcagtctgcacgtccacgtcccccacccggagtatggccccaggggcagtacacttaccccagccagtgtccacacgatcccaacacacgcagccaactccagaacccagcactgctccaagcacctccttcctgctcccaatgggccccagccccccagctgaagggagcactggcgacaccggtgagcccaaatcttctgacaaaactcacacatgcccaccgtgcccagcacctgaagccgcgggtgcaccgtcagtcttcctcttccccccaaaacccaaggacaccctcatgatctcccggacccctgaggtcacatgcgtggtggtggacgtgagccacgaagaccctgaggtcaagttcaactggtacgtggacggcgtggaggtgcataatgccaagacaaagccgcgggaggagcagtacaacagcacgtaccgtgtggtcagcgtcctcaccgtcctgcaccaggactggctgaatggcaaggcgtacgcgtgcgcggtctccaacaaagccctcccagcccccatcgagaaaaccatctccaaagccaaagggcagccccgagaaccacaggtgtacaccctgcccccatcccgggatgagctgaccaagaaccaggtcagcctgacctgcctggtcaaaggcttctatccaagcgacatcgccgtggagtgggagagcaatgggcagccggagaacaactacaagaccacgcctcccgtgctggactccgacggctccttcttcctctacagcaagctcaccgtggacaagagcaggtggcagcaggggaacgtcttctcatgctccgtgatgcatgaggctctgcacaaccactacacgcagaagagcctctccctgtctccgggtcagaggcacaacaattcttccctgaatacaagaactcagaaagcacgtcattctccgaattctgaagttcaattgttagagtctggtggcggtcttgttcagcctggtggttctttacgtctttcttgcgctgcttccggattcactttctcttggtacaagatgcattgggttcgccaagctcctggtaaaggtttggagtgggtttctggtatctcttcttctggtggccttactaagtatgctgactccgttaaaggtcgcttcactatctctagagacaactctaagaatactctctacttgcagatgaacagcttaagggctgaggacacagccgtgtattactgtaccacagagcggcgcggtgacgggggtgcttttgatatctggggccaagggacaatggtcaccgtctcaagcggtggcggcggttcggggggtggcggaagtggaggtggagggagtcaagacatccagatgacccagtctccatcctccctgtctgcatctgtaggagacagagtcaccatcacttgccgggcaagtcagagcattagcagctatttaaattggtatcagcagaaaccagggaaagcccctaagctcctgatctatgctgcatccagtttgcaaagtggggtcccatcaaaattcagcggcagtggatctgggacagatttcactctcaccatcagcagcctgctgcctgaagattttgcaacttattactgccaacagtatgagtatttccctccgacgttcggccaagggaccaaggtggaaatcaaatgagcggccgcctcgagtctagagggccctattctatagtgtcacctaaatgctagag

SEQ ID NO: 700 - DNA, 2294 bp, Artificial Sequence
  Made in a lab
aagcttgccgccatggattttcaagtgcagattttcagcttcctgctaatcagtgcttcagtcataatgtcgcgaggattgcccgcccaggtggcatttacaccctacgccccggagcccgggagcacatgccggctcagagaatactatgaccagacagctcagatgtgctgcagcaaatgctcgccgggccaacatgcaaaagtcttctgtaccaagacctcggacaccgtgtgtgactcctgtgaggacagcacatacacccagctctggaactgggttcccgagtgcttgagctgtggctcccgctgtagctctgaccaggtggaaactcaagcctgcactcgggaacagaaccgcatctgcacctgcaggcccggctggtactgcgcgctgagcaagcaggaggggtgccggctgtgcgcgccgctgcgcaagtgccgcccgggcttcggcgtggccagaccaggaactgaaacatcagacgtggtgtgcaagccctgtgccccggggacgttctccaacacgacttcatccacggatatttgcaggccccaccagatctgtaacgtggtggccatccctgggaatgcaagcatggatgcagtctgcacgtccacgtcccccacccggagtatggccccaggggcagtacacttaccccagccagtgtccacacgatcccaacacacgcagccaactccagaacccagcactgctccaagcacctccttcctgctcccaatgggccccagccccccagctgaagggagcactggcgacaccggtgagcccaaatcttctgacaaaactcacacatgcccaccgtgcccagcacctgaagccgcgggtgcaccgtcagtcttcctcttccccccaaaacccaaggacaccctcatgatctcccggacccctgaggtcacatgcgtggtggtggacgtgagccacgaagaccctgaggtcaagttcaactggtacgtggacggcgtggaggtgcataatgccaagacaaagccgcgggaggagcagtacaacagcacgtaccgtgtggtcagcgtcctcaccgtcctgcaccaggactggctgaatggcaaggcgtacgcgtgcgcggtctccaacaaagccctcccagcccccatcgagaaaaccatctccaaagccaaagggcagccccgagaaccacaggtgtacaccctgcccccatcccgggatgagctgaccaagaaccaggtcagcctgacctgcctggtcaaaggcttctatccaagcgacatcgccgtggagtgggagagcaatgggcagccggagaacaactacaagaccacgcctcccgtgctggactccgacggctccttcttcctctacagcaagctcaccgtggacaagagcaggtggcagcaggggaacgtcttctcatgctccgtgatgcatgaggctctgcacaaccactacacgcagaagagcctctccctgtctccgggtcagaggcacaacaattcttccctgaatacaagaactcagaaagcacgtcattctccgaattctgaagttcaattgttagagtctggtggcggtcttgttcagcctggtggttctttacgtctttcttgcgctgcttccggattcactttctctgagtacactatgtattgggttcgccaagctcctggtaaaggtttggagtgggtttcttatatctctccttctggtggcactactaattatgctggctccgttaaaggtcgcttcactatctctagagacaactctaagaatactctctacttgcagatgaacagcttaagggctgaggacacggccgtgtattactgtgcgaaaggagcttggggtgacatctactactacggtatggacgtctggggccaagggaccacggtcaccgtctcaagcggtggcggcggttcggggggtggcggaagtggaggtggagggagtcaagacatccagatgacccagtctccagactccctgtctttgtctccaggggaaagagccaccctctcctgcagggccagtcagagtgtcagcagcagctactcagcctggtaccagcagaaacctggccaggctcccaggctcctcatctatggtgcatccagcagggccactggcatcccagacaggttcagtggcagtgggtctgggacagacttcactctcaccatcagcagactggagcctgaagattttgcagtgtattactgtcagcagtatggtagctcatcgctcactttcggcggagggaccgaggtggagatcaaatgagcggccgc

SEQ ID NO: 701 - DNA, 2359 bp, Artificial Sequence
  Made in a lab
ggcttatcgaattaatacgactcactatagggagacccaagcttgccgccatggattttcaagtgcagattttcagcttcctgctaatcagtgcttcagtcataatgtcgcgaggattgcccgcccaggtggcatttacaccctacgccccggagcccgggagcacatgccggctcagagaatactatgaccagacagctcagatgtgctgcagcaaatgctcgccgggccaacatgcaaaagtcttctgtaccaagacctcggacaccgtgtgtgactcctgtgaggacagcacatacacccagctctggaactgggttcccgagtgcttgagctgtggctcccgctgtagctctgaccaggtggaaactcaagcctgcactcgggaacagaaccgcatctgcacctgcaggcccggctggtactgcgcgctgagcaagcaggaggggtgccggctgtgcgcgccgctgcgcaagtgccgcccgggcttcggcgtggccagaccaggaactgaaacatcagacgtggtgtgcaagccctgtgccccggggacgttctccaacacgacttcatccacggatatttgcaggccccaccagatctgtaacgtggtggccatccctgggaatgcaagcatggatgcagtctgcacgtccacgtcccccacccggagtatggccccaggggcagtacacttaccccagccagtgtccacacgatcccaacacacgcagccaactccagaacccagcactgctccaagcacctccttcctgctcccaatgggccccagccccccagctgaagggagcactggcgacaccggtgagcccaaatcttctgacaaaactcacacatgcccaccgtgcccagcacctgaagccgcgggtgcaccgtcagtcttcctcttccccccaaaacccaaggacaccctcatgatctcccggacccctgaggtcacatgcgtggtggtggacgtgagccacgaagaccctgaggtcaagttcaactggtacgtggacggcgtggaggtgcataatgccaagacaaagccgcgggaggagcagtacaacagcacgtaccgtgtggtcagcgtcctcaccgtcctgcaccaggactggctgaatggcaaggcgtacgcgtgcgcggtctccaacaaagccctcccagcccccatcgagaaaaccatctccaaagccaaagggcagccccgagaaccacaggtgtacaccctgcccccatcccgggatgagctgaccaagaaccaggtcagcctgacctgcctggtcaaaggcttctatccaagcgacatcgccgtggagtgggagagcaatgggcagccggagaacaactacaagaccacgcctcccgtgctggactccgacggctccttcttcctctacagcaagctcaccgtggacaagagcaggtggcagcaggggaacgtcttctcatgctccgtgatgcatgaggctctgcacaaccactacacgcagaagagcctctccctgtctccgggtcagaggcacaacaattcttccctgaatacaagaactcagaaagcacgtcattctccgaattctgaagttcaattgttagagtctggtggcggtcttgttcagcctggtggttctttacgtctttcttgcgctgcttccggattcactttctcttcttactggatgcattgggttcgccaagctcctggtaaaggtttggagtgggtttcttctatctatccttctggtggctctactgagtatgctgactccgttaaaggtcgcttcactatctctagagacaactctaagaatactctctacttgcagatgaacagcttaagggctgaggacacggccgtgtattactgtgcgaaaggaatctggttcgacccctggggccagggaaccctggtcaccgtctcaagcggtggcggcggttcggggggtggcggaagtggaggtggagggagtcaagacatccagatgacccagtctccagccaccctgtctgcctctgtaggagacagggtcaccatcacttgccggtcaagtcagaggattagcggctatttaaattggtatcagcagcaaccagggaaagcccctaagctcctgatctatgctgcatccaccttacaaagtggggtcccatcaaggatcagtggcagtggatctgggacagatttcagtctcatcatcagcagtctgcaacctgaagatgttgcaacttattattgtcaacagagttacagtcccccgttcacttttggccaagggaccaaggtggaaatcaaatgagcggccgcctcgagtctagagggccctattctatagtgtcacctaaatgctagagctcg

SEQ ID NO: 702 - DNA, 2288 bp, Artificial Sequence
  Made in a lab
aagcttgccgccatggattttcaagtgcagattttcagcttcctgctaatcagtgcttcagtcataatgtcgcgaggattgcccgcccaggtggcatttacaccctacgccccggagcccgggagcacatgccggctcagagaatactatgaccagacagctcagatgtgctgcagcaaatgctcgccgggccaacatgcaaaagtcttctgtaccaagacctcggacaccgtgtgtgactcctgtgaggacagcacatacacccagctctggaactgggttcccgagtgcttgagctgtggctcccgctgtagctctgaccaggtggaaactcaagcctgcactcgggaacagaaccgcatctgcacctgcaggcccggctggtactgcgcgctgagcaagcaggaggggtgccggctgtgcgcgccgctgcgcaagtgccgcccgggcttcggcgtggccagaccaggaactgaaacatcagacgtggtgtgcaagccctgtgccccggggacgttctccaacacgacttcatccacggatatttgcaggccccaccagatctgtaacgtggtggccatccctgggaatgcaagcatggatgcagtctgcacgtccacgtcccccacccggagtatggccccaggggcagtacacttaccccagccagtgtccacacgatcccaacacacgcagccaactccagaacccagcactgctccaagcacctccttcctgctcccaatgggccccagccccccagctgaagggagcactggcgacaccggtgagcccaaatcttctgacaaaactcacacatgcccaccgtgcccagcacctgaagccgcgggtgcaccgtcagtcttcctcttccccccaaaacccaaggacaccctcatgatctcccggacccctgaggtcacatgcgtggtggtggacgtgagccacgaagaccctgaggtcaagttcaactggtacgtggacggcgtggaggtgcataatgccaagacaaagccgcgggaggagcagtacaacagcacgtaccgtgtggtcagcgtcctcaccgtcctgcaccaggactggctgaatggcaaggcgtacgcgtgcgcggtctccaacaaagccctcccagcccccatcgagaaaaccatctccaaagccaaagggcagccccgagaaccacaggtgtacaccctgcccccatcccgggatgagctgaccaagaaccaggtcagcctgacctgcctggtcaaaggcttctatccaagcgacatcgccgtggagtgggagagcaatgggcagccggagaacaactacaagaccacgcctcccgtgctggactccgacggctccttcttcctctacagcaagctcaccgtggacaagagcaggtggcagcaggggaacgtcttctcatgctccgtgatgcatgaggctctgcacaaccactacacgcagaagagcctctccctgtctccgggtcagaggcacaacaattcttccctgaatacaagaactcagaaagcacgtcattctccgaattctgaagttcaattgttagagtctggtggcggtcttgttcagcctggtggtcctttacgtctttcttgcgctgcttccggattcactttctctcgttacggtatgatgtgggttcgccaagctcctggtaaaggtttggagtgggtttcttatatctcttcttctggtggctttactcgttatgctgactccgttaaaggtcgcttcactatctctagagacaactctaagaatactctctacttgcagatgaacagcttaagggctgaggacacggccgtgtattactgtgcgagagtgggtggatacagttatggcccacactttgacttctggggccagggcaccctggtcaccgtctcaagcggtggcggcggttcggggggtggcggaagtggaggtggagggagtcaagacatccagatgacccagtctccttccaccctgtctgcatctgtaggagacagagtcaccatcacttgccgggccagtcagagtattagtacctggttggcctggtttcagcagaaaccagggaaagcccctaagctgctgatctataaggcgtctagtttacaaagtggggtcccatcaaggttcagcggcagtggatctgggacagatttcactctcaccatcagcagcctgcagcctgaagattttgcaacttattactgccaacagtataagagttaccctttcactttcgggggagggaccaaggtggagatcaaatgagcggccgc

SEQ ID NO: 703 - DNA, 2294 bp, Artificial Sequence
  Made in a lab
aagcttgccgccatggattttcaagtgcagattttcagcttcctgctaatcagtgcttcagtcataatgtcgcgaggattgcccgcccaggtggcatttacaccctacgccccggagcccgggagcacatgccggctcagagaatactatgaccagacagctcagatgtgctgcagcaaatgctcgccgggccaacatgcaaaagtcttctgtaccaagacctcggacaccgtgtgtgactcctgtgaggacagcacatacacccagctctggaactgggttcccgagtgcttgagctgtggctcccgctgtagctctgaccaggtggaaactcaagcctgcactcgggaacagaaccgcatctgcacctgcaggcccggctggtactgcgcgctgagcaagcaggaggggtgccggctgtgcgcgccgctgcgcaagtgccgcccgggcttcggcgtggccagaccaggaactgaaacatcagacgtggtgtgcaagccctgtgccccggggacgttctccaacacgacttcatccacggatatttgcaggccccaccagatctgtaacgtggtggccatccctgggaatgcaagcatggatgcagtctgcacgtccacgtcccccacccggagtatggccccaggggcagtacacttaccccagccagtgtccacacgatcccaacacacgcagccaactccagaacccagcactgctccaagcacctccttcctgctcccaatgggccccagccccccagctgaagggagcactggcgacaccggtgagcccaaatcttctgacaaaactcacacatgcccaccgtgcccagcacctgaagccgcgggtgcaccgtcagtcttcctcttccccccaaaacccaaggacaccctcatgatctcccggacccctgaggtcacatgcgtggtggtggacgtgagccacgaagaccctgaggtcaagttcaactggtacgtggacggcgtggaggtgcataatgccaagacaaagccgcgggaggagcagtacaacagcacgtaccgtgtggtcagcgtcctcaccgtcctgcaccaggactggctgaatggcaaggcgtacgcgtgcgcggtctccaacaaagccctcccagcccccatcgagaaaaccatctccaaagccaaagggcagccccgagaaccacaggtgtacaccctgcccccatcccgggatgagctgaccaagaaccaggtcagcctgacctgcctggtcaaaggcttctatccaagcgacatcgccgtggagtgggagagcaatgggcagccggagaacaactacaagaccacgcctcccgtgctggactccgacggctccttcttcctctacagcaagctcaccgtggacaagagcaggtggcagcaggggaacgtcttctcatgctccgtgatgcatgaggctctgcacaaccactacacgcagaagagcctctccctgtctccgggtcagaggcacaacaattcttccctgaatacaagaactcagaaagcacgtcattctccgaattctgaagttcaattgttagagtctggtggcggtcttgttcagcctggtggttctttacgtctttcttgcgctgcttccggattcactttctcttggtaccatatgatttgggttcgccaagctcctggtaaaggtttggagtgggtttcttggatctctccttctggtggctttactaagtatgctgactccgttaaaggtcgcttcactatctctagagacaactctaagaatactctctacttgcagatgaacagcttaagggctgaggacacggccgtgtattactgtgcgaggtatgactctcgggcagcagctggtacgaatgcttttgatatctggggccaagggacaatggtcaccgtctcaagcggtggcggcggttcggggggtggcggaagtggaggtggagggagtcaagacatccagatgacccagtctccatcctccctgtctgcatctgttggagacagtgtcaccatcacttgccaggcgagtcaggacattaggtcctatttaaattggtttcagcagaaaccagggaaagcccctaagctcctgatctacgacacagtcaatttgcaaacaggggtcccatcgaggttcagtggaagtggatctgggacagattatagtttcaccatcaacaacctgcagcctgaagactttgcaacatattgctgtcaacagtatgaatatctcccgatcaccttcggccaagggacacgactggagattaaatgagcggccgc

SEQ ID NO: 704 - DNA, 2301 bp, Artificial Sequence
  Made in a lab
gcgagggaagcttgccgccatggattttcaagtgcagattttcagcttcctgctaatcagtgcttcagtcataatgtcgcgaggattgcccgcccaggtggcatttacaccctacgccccggagcccgggagcacatgccggctcagagaatactatgaccagacagctcagatgtgctgcagcaaatgctcgccgggccaacatgcaaaagtcttctgtaccaagacctcggacaccgtgtgtgactcctgtgaggacagcacatacacccagctctggaactgggttcccgagtgcttgagctgtggctcccgctgtagctctgaccaggtggaaactcaagcctgcactcgggaacagaaccgcatctgcacctgcaggcccggctggtactgcgcgctgagcaagcaggaggggtgccggctgtgcgcgccgctgcgcaagtgccgcccgggcttcggcgtggccagaccaggaactgaaacatcagacgtggtgtgcaagccctgtgccccggggacgttctccaacacgacttcatccacggatatttgcaggccccaccagatctgtaacgtggtggccatccctgggaatgcaagcatggatgcagtctgcacgtccacgtcccccacccggagtatggccccaggggcagtacacttaccccagccagtgtccacacgatcccaacacacgcagccaactccagaacccagcactgctccaagcacctccttcctgctcccaatgggccccagccccccagctgaagggagcactggcgacaccggtgagcccaaatcttctgacaaaactcacacatgcccaccgtgcccagcacctgaagccgcgggtgcaccgtcagtcttcctcttccccccaaaacccaaggacaccctcatgatctcccggacccctgaggtcacatgcgtggtggtggacgtgagccacgaagaccctgaggtcaagttcaactggtacgtggacggcgtggaggtgcataatgccaagacaaagccgcgggaggagcagtacaacagcacgtaccgtgtggtcagcgtcctcaccgtcctgcaccaggactggctgaatggcaaggcgtacgcgtgcgcggtctccaacaaagccctcccagcccccatcgagaaaaccatctccaaagccaaagggcagccccgagaaccacaggtgtacaccctgcccccatcccgggatgagctgaccaagaaccaggtcagcctgacctgcctggtcaaaggcttctatccaagcgacatcgccgtggagtgggagagcaatgggcagccggagaacaactacaagaccacgcctcccgtgctggactccgacggctccttcttcctctacagcaagctcaccgtggacaagagcaggtggcagcaggggaacgtcttctcatgctccgtgatgcatgaggctctgcacaaccactacacgcagaagagcctctccctgtctccgggtcagaggcacaacaattcttccctgaatacaagaactcagaaagcacgtcattctccgaattctgaagttcaattgttagagtctggtggcggtcttgttcagcctggtggttctttacgtctttcttgcgctgcttccggattcactttctctccttacaagatggtttgggttcgccaagctcctggtaaaggtttggagtgggtttctggtatctctccttctggtggctatacttattatgctgactccgttaaaggtcgcttcactatctctagagacaactctaagaatactctctacttgcagatgaacagcttaagggctgaggacacggccgtgtattactgtgcgagagggggatatggctggagctactactactacggtatggacgtctggggccaagggaccacggtcaccgtctcaagcggtggcggcggttcggggggtggcggaagtggaggtggagggagtcaagacatccagatgacccagtctccatcctccctgtctgcatctgtcggggacagagtcaccatcacttgccgggcaagtcagagcatcagcaactatttaaattggtatcagcagaaatcagggaaagcccctaacctcctgatgtatgccgcatccagtttacacagtggggtctcgtccaggttcagtggtagtggatctgggacagagttcactctcaccatcagcagtctgcaacctgaagattatgcaacttactactgtcaacagagttacagtacctcgggaacgttcggccaagggaccaaggtggaaatcaaatgagcggccgc

SEQ ID NO: 705 - DNA, 2279 bp, Artificial Sequence
  Made in a lab
aagcttgccgccatggattttcaagtgcagattttcagcttcctgctaatcagtgcttcagtcataatgtcgcgaggattgcccgcccaggtggcatttacaccctacgccccggagcccgggagcacatgccggctcagagaatactatgaccagacagctcagatgtgctgcagcaaatgctcgccgggccaacatgcaaaagtcttctgtaccaagacctcggacaccgtgtgtgactcctgtgaggacagcacatacacccagctctggaactgggttcccgagtgcttgagctgtggctcccgctgtagctctgaccaggtggaaactcaagcctgcactcgggaacagaaccgcatctgcacctgcaggcccggctggtactgcgcgctgagcaagcaggaggggtgccggctgtgcgcgccgctgcgcaagtgccgcccgggcttcggcgtggccagaccaggaactgaaacatcagacgtggtgtgcaagccctgtgccccggggacgttctccaacacgacttcatccacggatatttgcaggccccaccagatctgtaacgtggtggccatccctgggaatgcaagcatggatgcagtctgcacgtccacgtcccccacccggagtatggccccaggggcagtacacttaccccagccagtgtccacacgatcccaacacacgcagccaactccagaacccagcactgctccaagcacctccttcctgctcccaatgggccccagccccccagctgaagggagcactggcgacaccggtgagcccaaatcttctgacaaaactcacacatgcccaccgtgcccagcacctgaagccgcgggtgcaccgtcagtcttcctcttccccccaaaacccaaggacaccctcatgatctcccggacccctgaggtcacatgcgtggtggtggacgtgagccacgaagaccctgaggtcaagttcaactggtacgtggacggcgtggaggtgcataatgccaagacaaagccgcgggaggagcagtacaacagcacgtaccgtgtggtcagcgtcctcaccgtcctgcaccaggactggctgaatggcaaggcgtacgcgtgcgcggtctccaacaaagccctcccagcccccatcgagaaaaccatctccaaagccaaagggcagccccgagaaccacaggtgtacaccctgcccccatcccgggatgagctgaccaagaaccaggtcagcctgacctgcctggtcaaaggcttctatccaagcgacatcgccgtggagtgggagagcaatgggcagccggagaacaactacaagaccacgcctcccgtgctggactccgacggctccttcttcctctacagcaagctcaccgtggacaagagcaggtggcagcaggggaacgtcttctcatgctccgtgatgcatgaggctctgcacaaccactacacgcagaagagcctctccctgtctccgggtcagaggcacaacaattcttccctgaatacaagaactcagaaagcacgtcattctccgaattctgaagttcaattgttagagtctggtggcggtcttgttcagcctggtggttctttacgtctttcttgcgctgcttccggattcactttctctaattactggatgtattgggttcgccaagctcctggtaaaggtttggagtgggtttctgttatctcttcttctggtggccatactttttatgctgactccgttaaaggtcgcttcactatctctagagacaactctaagaatactctctacttgcagatgaacagcttaagggctgaggacactgcagtctactattgtgcgagagattatgaaggtgggagcaatgactactggggccagggaaccctggtcaccgtctcaagcggtggcggcggttcggggggtggcggaagtggaggtggagggagtcaagacatccagatgacccagtctccatcctccctgtctgcatctgtaggagacagagtcaccatcacttgccgggcaagtcagagcattagcagctatttaaattggtatcagcagaaaccagggaaagcccctaagctcctgatctatgctgcatccagtttgcaaagtggggtcccatcaaggttcagtggcagtggatctgggacagatttcactctcaccatcagcagtctgcaacctgaagattttgcaacttactactgtcaacagagttacagtacccccgtcactttcggcggagggaccaaggtggagatcaaatgagcggccgc

SEQ ID NO: 706 - DNA, 2288 bp, Artificial Sequence
  Made in a lab
aagcttgccgccatggattttcaagtgcagattttcagcttcctgctaatcagtgcttcagtcataatgtcgcgaggattgcccgcccaggtggcatttacaccctacgccccggagcccgggagcacatgccggctcagagaatactatgaccagacagctcagatgtgctgcagcaaatgctcgccgggccaacatgcaaaagtcttctgtaccaagacctcggacaccgtgtgtgactcctgtgaggacagcacatacacccagctctggaactgggttcccgagtgcttgagctgtggctcccgctgtagctctgaccaggtggaaactcaagcctgcactcgggaacagaaccgcatctgcacctgcaggcccggctggtactgcgcgctgagcaagcaggaggggtgccggctgtgcgcgccgctgcgcaagtgccgcccgggcttcggcgtggccagaccaggaactgaaacatcagacgtggtgtgcaagccctgtgccccggggacgttctccaacacgacttcatccacggatatttgcaggccccaccagatctgtaacgtggtggccatccctgggaatgcaagcatggatgcagtctgcacgtccacgtcccccacccggagtatggccccaggggcagtacacttaccccagccagtgtccacacgatcccaacacacgcagccaactccagaacccagcactgctccaagcacctccttcctgctcccaatgggccccagccccccagctgaagggagcactggcgacaccggtgagcccaaatcttctgacaaaactcacacatgcccaccgtgcccagcacctgaagccgcgggtgcaccgtcagtcttcctcttccccccaaaacccaaggacaccctcatgatctcccggacccctgaggtcacatgcgtggtggtggacgtgagccacgaagaccctgaggtcaagttcaactggtacgtggacggcgtggaggtgcataatgccaagacaaagccgcgggaggagcagtacaacagcacgtaccgtgtggtcagcgtcctcaccgtcctgcaccaggactggctgaatggcaaggcgtacgcgtgcgcggtctccaacaaagccctcccagcccccatcgagaaaaccatctccaaagccaaagggcagccccgagaaccacaggtgtacaccctgcccccatcccgggatgagctgaccaagaaccaggtcagcctgacctgcctggtcaaaggcttctatccaagcgacatcgccgtggagtgggagagcaatgggcagccggagaacaactacaagaccacgcctcccgtgctggactccgacggctccttcttcctctacagcaagctcaccgtggacaagagcaggtggcagcaggggaacgtcttctcatgctccgtgatgcatgaggctctgcacaaccactacacgcagaagagcctctccctgtctccgggtcagaggcacaacaattcttccctgaatacaagaactcagaaagcacgtcattctccgaattctgaagttcaattgttagagtctggtggcggtcttgttcagcctggtggttctttacgtctttcttgcgctgcttccggattcactttctctaattacgctatgtcttgggttcgccaagctcctggtaaaggtttggagtgggtttcttctatctattcttctggtggctatactgcttatgctgactccgttaaaggtcgcttcactatctctagagacaactctaagaatactctctacttgcagatgaacagcttaagggctgaggacaccgccatgtattactgtgcacgggtcccccatgtgtttcggggcgagcttgactactggggccagggaaccctggtcaccgtctcaagcggtggcggcggttcggggggtggcggaagtggaggtggagggagtcaagacatccagatgacccagtctccatcctccctgtctgcatctgtgggagacagagtcgccatcacttgccgcgcaagtcagagcatcgacacctatttaaattggtatcagcataaaccagggaaagcccctaaactcctgatctatgctgcatccagtttgcagagtggggtcccatcaaggttcagtggcagcggatctgggacagatttcactctcaccatcagcggtctgcaacctgaagattttgcaagttatttctgtcaacagagctactctagtccagggatcactttcggcggagggaccagggtggaaatcaaatgagcggccgc

SEQ ID NO: 707 - DNA, 2291 bp, Artificial Sequence
  Made in a lab
aagcttgccgccatggattttcaagtgcagattttcagcttcctgctaatcagtgcttcagtcataatgtcgcgaggattgcccgcccaggtggcatttacaccctacgccccggagcccgggagcacatgccggctcagagaatactatgaccagacagctcagatgtgctgcagcaaatgctcgccgggccaacatgcaaaagtcttctgtaccaagacctcggacaccgtgtgtgactcctgtgaggacagcacatacacccagctctggaactgggttcccgagtgcttgagctgtggctcccgctgtagctctgaccaggtggaaactcaagcctgcactcgggaacagaaccgcatctgcacctgcaggcccggctggtactgcgcgctgagcaagcaggaggggtgccggctgtgcgcgccgctgcgcaagtgccgcccgggcttcggcgtggccagaccaggaactgaaacatcagacgtggtgtgcaagccctgtgccccggggacgttctccaacacgacttcatccacggatatttgcaggccccaccagatctgtaacgtggtggccatccctgggaatgcaagcatggatgcagtctgcacgtccacgtcccccacccggagtatggccccaggggcagtacacttaccccagccagtgtccacacgatcccaacacacgcagccaactccagaacccagcactgctccaagcacctccttcctgctcccaatgggccccagccccccagctgaagggagcactggcgacaccggtgagcccaaatcttctgacaaaactcacacatgcccaccgtgcccagcacctgaagccgcgggtgcaccgtcagtcttcctcttccccccaaaacccaaggacaccctcatgatctcccggacccctgaggtcacatgcgtggtggtggacgtgagccacgaagaccctgaggtcaagttcaactggtacgtggacggcgtggaggtgcataatgccaagacaaagccgcgggaggagcagtacaacagcacgtaccgtgtggtcagcgtcctcaccgtcctgcaccaggactggctgaatggcaaggcgtacgcgtgcgcggtctccaacaaagccctcccagcccccatcgagaaaaccatctccaaagccaaagggcagccccgagaaccacaggtgtacaccctgcccccatcccgggatgagctgaccaagaaccaggtcagcctgacctgcctggtcaaaggcttctatccaagcgacatcgccgtggagtgggagagcaatgggcagccggagaacaactacaagaccacgcctcccgtgctggactccgacggctccttcttcctctacagcaagctcaccgtggacaagagcaggtggcagcaggggaacgtcttctcatgctccgtgatgcatgaggctctgcacaaccactacacgcagaagagcctctccctgtctccgggtcagaggcacaacaattcttccctgaatacaagaactcagaaagcacgtcattctccgaattctgaagttcaattgttagagtctggtggcggtcttgttcagcctggtggttctttacgtctttcttgcgctgcttccggattcactttctctttttacactatgtggtgggttcgccaagctcctggtaaaggtttggagtgggtttcttctatctatccttctggtggccagactctttatgctgactccgttaaaggtcgcttcactatctctagagacaactctaagaatactctctacttgcagatgaacagcttaagggctgaggacacggccgtgtattactgtgcgaggcccgacagctatggttacctctactacggtatggacgtctggggccaagggaccacggtcaccgtctcaagcggtggcggcggttcggggggtggcggaagtggaggtggagggagtcaagacatccagatgacccagtctccatcctccctgtctgcatctgtcggagacagagtcaccatcacttgccgggcaagtcagagcattggcacctatttaaactggtatcagcagaagccagggaaagcccctaacctcctgatctatgggacatccagtttgcaaagaggggtcccatcaaggttcagtggcagtggatctgggacagatttcactctcaccataagtaccttgcaacctgaagattttgtacattactactgtcaacagagttacacttcccctccgacgttcggccaagggaccaaggtggaggtcaaatgagcggccgc

SEQ ID NO: 708 - DNA, 2264 bp, Artificial Sequence
  Made in a lab
aagcttgccgccatggattttcaagtgcagattttcagcttcctgctaatcagtgcttcagtcataatgtcgcgaggattgcccgcccaggtggcatttacaccctacgccccggagcccgggagcacatgccggctcagagaatactatgaccagacagctcagatgtgctgcagcaaatgctcgccgggccaacatgcaaaagtcttctgtaccaagacctcggacaccgtgtgtgactcctgtgaggacagcacatacacccagctctggaactgggttcccgagtgcttgagctgtggctcccgctgtagctctgaccaggtggaaactcaagcctgcactcgggaacagaaccgcatctgcacctgcaggcccggctggtactgcgcgctgagcaagcaggaggggtgccggctgtgcgcgccgctgcgcaagtgccgcccgggcttcggcgtggccagaccaggaactgaaacatcagacgtggtgtgcaagccctgtgccccggggacgttctccaacacgacttcatccacggatatttgcaggccccaccagatctgtaacgtggtggccatccctgggaatgcaagcatggatgcagtctgcacgtccacgtcccccacccggagtatggccccaggggcagtacacttaccccagccagtgtccacacgatcccaacacacgcagccaactccagaacccagcactgctccaagcacctccttcctgctcccaatgggccccagccccccagctgaagggagcactggcgacaccggtgagcccaaatcttctgacaaaactcacacatgcccaccgtgcccagcacctgaagccgcgggtgcaccgtcagtcttcctcttccccccaaaacccaaggacaccctcatgatctcccggacccctgaggtcacatgcgtggtggtggacgtgagccacgaagaccctgaggtcaagttcaactggtacgtggacggcgtggaggtgcataatgccaagacaaagccgcgggaggagcagtacaacagcacgtaccgtgtggtcagcgtcctcaccgtcctgcaccaggactggctgaatggcaaggcgtacgcgtgcgcggtctccaacaaagccctcccagcccccatcgagaaaaccatctccaaagccaaagggcagccccgagaaccacaggtgtacaccctgcccccatcccgggatgagctgaccaagaaccaggtcagcctgacctgcctggtcaaaggcttctatccaagcgacatcgccgtggagtgggagagcaatgggcagccggagaacaactacaagaccacgcctcccgtgctggactccgacggctccttcttcctctacagcaagctcaccgtggacaagagcaggtggcagcaggggaacgtcttctcatgctccgtgatgcatgaggctctgcacaaccactacacgcagaagagcctctccctgtctccgggtcagaggcacaacaattcttccctgaatacaagaactcagaaagcacgtcattctccgaattctgaagttcaattgttagagtctggtggcggtcttgttcagcctggtggttctttacgtctttcttgcgctgcttccggattcactttctcttggtaccctatggagtgggttcgccaagctcctggtaaaggtttggagtgggtttctggtatcggtccttctggtggccagactacttatgctgactccgttaaaggtcgcttcactatctctagagacaactctaagaatactctctacttgcagatgaacagcttaagggctgaggacacggccgtgtattactgtgcaagagggtcttacagttttatctggggccaagggacaatggtcaccgtctcaagcggtggcggcggttcggggggtggcggaagtggaggtggagggagtcagtacgaattgactcagtcaccctcggtgtccgtgtccccaggacagacagccagcatcccctgctctggagatcaattggggggtaaatttacttcctggtatcaacagaaggcaggccagtctcctctcctggtcatctatcaagatactaagcggccctcagggatccctgagcgattctctggctccaattctgggaacacagccactctgaccatcaccgggacccaggctatggatgaggctgactattactgtctggtgtgggacagcaacacttatgtcttcggacctgggaccaaggtcaccgtcctgtgagcggccgc

SEQ ID NO: 709 - DNA, 2300 bp, Artificial Sequence
  Made in a lab
aagcttgccgccatggattttcaagtgcagattttcagcttcctgctaatcagtgcttcagtcataatgtcgcgaggattgcccgcccaggtggcatttacaccctacgccccggagcccgggagcacatgccggctcagagaatactatgaccagacagctcagatgtgctgcagcaaatgctcgccgggccaacatgcaaaagtcttctgtaccaagacctcggacaccgtgtgtgactcctgtgaggacagcacatacacccagctctggaactgggttcccgagtgcttgagctgtggctcccgctgtagctctgaccaggtggaaactcaagcctgcactcgggaacagaaccgcatctgcacctgcaggcccggctggtactgcgcgctgagcaagcaggaggggtgccggctgtgcgcgccgctgcgcaagtgccgcccgggcttcggcgtggccagaccaggaactgaaacatcagacgtggtgtgcaagccctgtgccccggggacgttctccaacacgacttcatccacggatatttgcaggccccaccagatctgtaacgtggtggccatccctgggaatgcaagcatggatgcagtctgcacgtccacgtcccccacccggagtatggccccaggggcagtacacttaccccagccagtgtccacacgatcccaacacacgcagccaactccagaacccagcactgctccaagcacctccttcctgctcccaatgggccccagccccccagctgaagggagcactggcgacaccggtgagcccaaatcttctgacaaaactcacacatgcccaccgtgcccagcacctgaagccgcgggtgcaccgtcagtcttcctcttccccccaaaacccaaggacaccctcatgatctcccggacccctgaggtcacatgcgtggtggtggacgtgagccacgaagaccctgaggtcaagttcaactggtacgtggacggcgtggaggtgcataatgccaagacaaagccgcgggaggagcagtacaacagcacgtaccgtgtggtcagcgtcctcaccgtcctgcaccaggactggctgaatggcaaggcgtacgcgtgcgcggtctccaacaaagccctcccagcccccatcgagaaaaccatctccaaagccaaagggcagccccgagaaccacaggtgtacaccctgcccccatcccgggatgagctgaccaagaaccaggtcagcctgacctgcctggtcaaaggcttctatccaagcgacatcgccgtggagtgggagagcaatgggcagccggagaacaactacaagaccacgcctcccgtgctggactccgacggctccttcttcctctacagcaagctcaccgtggacaagagcaggtggcagcaggggaacgtcttctcatgctccgtgatgcatgaggctctgcacaaccactacacgcagaagagcctctccctgtctccgggtcagaggcacaacaattcttccctgaatacaagaactcagaaagcacgtcattctccgaattctgaagttcaattgttagagtctggtggcggtcttgttcagcctggtggttctttacgtctttcttgcgctgcttccggattcactttctctctttacaagatggcttgggttcgccaagctcctggtaaaggtttggagtgggtttctgttatcggttcttctggtggccgtactccttatgctgactccgttaaaggtcgcttcactatctctagagacaactctaagaatactctctacttgcagatgaacagcttaagggctgaggacacggccgtgtattactgtgcgagagctcctctgagcggatggttcgggcaagcacatgatgcttttgatatctggggccaagggacaatggtcaccgtctcaagcggtggcggcggttcggggggtggcggaagtggaggtggagggagtcagtacgaattgactcagtcaccctcggtgtcagtggccccaggacagacggccaggattacttgtgggggaaacaacattggaagtaaaagtgtacactggtatcagcagaagccaggccaggcccctgtactggtcgtctatgatgatagcgaccggccctcagggatccctgagcgattctctggctccaactctgggaacacggccaccctgaccgtcagcagggtcgaagccggcgatgaggccgactattactgtcaggtgtgggatagtagtggtggtctgcaagtcttcggaactgggaccaaggtcaccgtcctatgagcggccgc

SEQ ID NO: 710 - DNA, 2378 bp, Artificial Sequence
  Made in a lab
tggcttatcgaattaatacgactcactatagggagacccaagcttgccgccatggattttcaagtgcagattttcagcttcctgctaatcagtgcttcagtcataatgtcgcgaggattgcccgcccaggtggcatttacaccctacgccccggagcccgggagcacatgccggctcagagaatactatgaccagacagctcagatgtgctgcagcaaatgctcgccgggccaacatgcaaaagtcttctgtaccaagacctcggacaccgtgtgtgactcctgtgaggacagcacatacacccagctctggaactgggttcccgagtgcttgagctgtggctcccgctgtagctctgaccaggtggaaactcaagcctgcactcgggaacagaaccgcatctgcacctgcaggcccggctggtactgcgcgctgagcaagcaggaggggtgccggctgtgcgcgccgctgcgcaagtgccgcccgggcttcggcgtggccagaccaggaactgaaacatcagacgtggtgtgcaagccctgtgccccggggacgttctccaacacgacttcatccacggatatttgcaggccccaccagatctgtaacgtggtggccatccctgggaatgcaagcatggatgcagtctgcacgtccacgtcccccacccggagtatggccccaggggcagtacacttaccccagccagtgtccacacgatcccaacacacgcagccaactccagaacccagcactgctccaagcacctccttcctgctcccaatgggccccagccccccagctgaagggagcactggcgacaccggtgagcccaaatcttctgacaaaactcacacatgcccaccgtgcccagcacctgaagccgcgggtgcaccgtcagtcttcctcttccccccaaaacccaaggacaccctcatgatctcccggacccctgaggtcacatgcgtggtggtggacgtgagccacgaagaccctgaggtcaagttcaactggtacgtggacggcgtggaggtgcataatgccaagacaaagccgcgggaggagcagtacaacagcacgtaccgtgtggtcagcgtcctcaccgtcctgcaccaggactggctgaatggcaaggcgtacgcgtgcgcggtctccaacaaagccctcccagcccccatcgagaaaaccatctccaaagccaaagggcagccccgagaaccacaggtgtacaccctgcccccatcccgggatgagctgaccaagaaccaggtcagcctgacctgcctggtcaaaggcttctatccaagcgacatcgccgtggagtgggagagcaatgggcagccggagaacaactacaagaccacgcctcccgtgctggactccgacggctccttcttcctctacagcaagctcaccgtggacaagagcaggtggcagcaggggaacgtcttctcatgctccgtgatgcatgaggctctgcacaaccactacacgcagaagagcctctccctgtctccgggtcagaggcacaacaattcttccctgaatacaagaactcagaaagcacgtcattctccgaattctgaagttcaattgttagagtctggtggcggtcttgttcagcctggtggttctttacgtctttcttgcgctgcttccggattcactttctctacttacgagatgaattgggttcgccaagctcctggtaaaggtttggagtgggtttctggtatcgttccttctggtggcgttacttattatgctgactccgttaaaggtcgcttcactatctctagagacaactctaagaatactctctacttgcagatgaacagcttaagggctgaggacacggccgtgtattactgtgcgaggggaccgtacagctatggtcacgactacggtatggacgtctggggccaagggaccacggtcaccgtctcaagcggtggcggcggttcggggggtggcggaagtggaggtggagggagtcaagacatccagatgacccagtctccttccaccctgtctgcatctgtaggagacagggtcaccatcacttgccgggccagtcagagtattagtagctggttggcctggtatcagcagaaaccagggaaagcccctaagctcctgatctataaggcgtctaatttagaaagtgaggtcccatcaaggttcagcggcagtggatctgggacagaattcactctcaccatcagcagcctgcagcctgatgattttgcaacttattactgccaacagtataatgcttatccattcattttcggccctgggaccaaagtggatatcaaatgagcggccgcctcgagtctagagggccctattctatagtgtcacctaaatgctagagc

SEQ ID NO: 711 - DNA, 2369 bp, Artificial Sequence
  Made in a lab
ttactggcttatcgaattatacgactcactatagggagacccaagcttgccgccatggattttcaagtgcagattttcagcttcctgctaatcagtgcttcagtcataatgtcgcgaggattgcccgcccaggtggcatttacaccctacgccccggagcccgggagcacatgccggctcagagaatactatgaccagacagctcagatgtgctgcagcaaatgctcgccgggccaacatgcaaaagtcttctgtaccaagacctcggacaccgtgtgtgactcctgtgaggacagcacatacacccagctctggaactgggttcccgagtgcttgagctgtggctcccgctgtagctctgaccaggtggaaactcaagcctgcactcgggaacagaaccgcatctgcacctgcaggcccggctggtactgcgcgctgagcaagcaggaggggtgccggctgtgcgcgccgctgcgcaagtgccgcccgggcttcggcgtggccagaccaggaactgaaacatcagacgtggtgtgcaagccctgtgccccggggacgttctccaacacgacttcatccacggatatttgcaggccccaccagatctgtaacgtggtggccatccctgggaatgcaagcatggatgcagtctgcacgtccacgtcccccacccggagtatggccccaggggcagtacacttaccccagccagtgtccacacgatcccaacacacgcagccaactccagaacccagcactgctccaagcacctccttcctgctcccaatgggccccagccccccagctgaagggagcactggcgacaccggtgagcccaaatcttctgacaaaactcacacatgcccaccgtgcccagcacctgaagccgcgggtgcaccgtcagtcttcctcttccccccaaaacccaaggacaccctcatgatctcccggacccctgaggtcacatgcgtggtggtggacgtgagccacgaagaccctgaggtcaagttcaactggtacgtggacggcgtggaggtgcataatgccaagacaaagccgcgggaggagcagtacaacagcacgtaccgtgtggtcagcgtcctcaccgtcctgcaccaggactggctgaatggcaaggcgtacgcgtgcgcggtctccaacaaagccctcccagcccccatcgagaaaaccatctccaaagccaaagggcagccccgagaaccacaggtgtacaccctgcccccatcccgggatgagctgaccaagaaccaggtcagcctgacctgcctggtcaaaggcttctatccaagcgacatcgccgtggagtgggagagcaatgggcagccggagaacaactacaagaccacgcctcccgtgctggactccgacggctccttcttcctctacagcaagctcaccgtggacaagagcaggtggcagcaggggaacgtcttctcatgctccgtgatgcatgaggctctgcacaaccactacacgcagaagagcctctccctgtctccgggtcagaggcacaacaattcttccctgaatacaagaactcagaaagcacgtcattctccgaattctgaagttcaattgttagagtctggtggcggtcttgttcagcctggtggttctttacgtctttcttgcgctgcttccggattcactttctctgtttaccctatgcattgggttcgccaagctcctggtaaaggtttggagtgggtttcttctatctattcttctggtggctttactatgtatgctgactccgttaaaggtcgcttcactatctctagagacaactctaagaatactctctacttgcagatgaacagcttaagggctgaggacacggccgtgtattactgtgtgagagaaggggtggcggatgcttttgatatctggggccaagggacaatggtcaccgtctcaagcggtggcggcggttcggggggtggcggaagtggaggtggagggagtcaagacatccagatgacccagtctccttccaccctgtctgcatctgtaggagacagagtcaccatcacttgccgggccagtcagagtattagtagctggttggcctggtatcagcagaaaccagggaaagcccctaagctcctgatctataaggcgtctagtttagaaagtggggtcccatcaaggttcagcggcagtggatctgggacagaattcactctcaccatcagcagcctgcagcctgatgattttgcaacttatcactgccaacagtataaaagttactggacgttcggccaagggaccaaggtggaaatcaaatgagcggccgcctcgagtctagagggccctattctatagtgtcacctaaatgctagagctcg

SEQ ID NO: 712 - DNA, 2291 bp, Artificial Sequence
  Made in a lab
aagcttgccgccatggattttcaagtgcagattttcagcttcctgctaatcagtgcttcagtcataatgtcgcgaggattgcccgcccaggtggcatttacaccctacgccccggagcccgggagcacatgccggctcagagaatactatgaccagacagctcagatgtgctgcagcaaatgctcgccgggccaacatgcaaaagtcttctgtaccaagacctcggacaccgtgtgtgactcctgtgaggacagcacatacacccagctctggaactgggttcccgagtgcttgagctgtggctcccgctgtagctctgaccaggtggaaactcaagcctgcactcgggaacagaaccgcatctgcacctgcaggcccggctggtactgcgcgctgagcaagcaggaggggtgccggctgtgcgcgccgctgcgcaagtgccgcccgggcttcggcgtggccagaccaggaactgaaacatcagacgtggtgtgcaagccctgtgccccggggacgttctccaacacgacttcatccacggatatttgcaggccccaccagatctgtaacgtggtggccatccctgggaatgcaagcatggatgcagtctgcacgtccacgtcccccacccggagtatggccccaggggcagtacacttaccccagccagtgtccacacgatcccaacacacgcagccaactccagaacccagcactgctccaagcacctccttcctgctcccaatgggccccagccccccagctgaagggagcactggcgacaccggtgagcccaaatcttctgacaaaactcacacatgcccaccgtgcccagcacctgaagccgcgggtgcaccgtcagtcttcctcttccccccaaaacccaaggacaccctcatgatctcccggacccctgaggtcacatgcgtggtggtggacgtgagccacgaagaccctgaggtcaagttcaactggtacgtggacggcgtggaggtgcataatgccaagacaaagccgcgggaggagcagtacaacagcacgtaccgtgtggtcagcgtcctcaccgtcctgcaccaggactggctgaatggcaaggcgtacgcgtgcgcggtctccaacaaagccctcccagcccccatcgagaaaaccatctccaaagccaaagggcagccccgagaaccacaggtgtacaccctgcccccatcccgggatgagctgaccaagaaccaggtcagcctgacctgcctggtcaaaggcttctatccaagcgacatcgccgtggagtgggagagcaatgggcagccggagaacaactacaagaccacgcctcccgtgctggactccgacggctccttcttcctctacagcaagctcaccgtggacaagagcaggtggcagcaggggaacgtcttctcatgctccgtgatgcatgaggctctgcacaaccactacacgcagaagagcctctccctgtctccgggtcagaggcacaacaattcttccctgaatacaagaactcagaaagcacgtcattctccgaattctgaagttcaattgttagagtctggtggcggtcttgttcagcctggtggttctttacgtctttcttgcgctgcttccggattcactttctcttcttacactatgcattgggttcgccaagctcctggtaaaggtttggagtgggtttcttctatctctccttctggtggcatgactttttatgctgactccgttaaaggtcgcttcactatctctagagacaactctaagaatactctctacttgcagatgaacagcttaagggctgaggacactgcagtctactattgtgcgagaacttacgatttttggagtggttattttgactactggggccagggaactctggtcaccgtctcaagcggtggcggcggttcggggggtggcggaagtggaggtggagggagtcagagcgaattgactcagccaccctcggtatctgaagcccccaggcagagggtcaccgtctcctgttctggaagcccctccaacatcggaagtaattctgtaaactggtaccaacagctcccaggaaaggctcccaaagtcgtcatctattatgatgatctggtgccctcaggagtctctgaccgattctctggctccaagtctggcacttcagcctccctggccatcagtgggctccagtctgaggatgaggctgattattactgtgcagcatgggatgacaggctgaatggttgggtgttcggcggagggaccaagctgaccgtcctatgagcggccgc

SEQ ID NO: 713 - DNA, 2299 bp, Artificial Sequence
  Made in a lab
agcttgccgccatggattttcaagtgcagattttcagcttcctgctaatcagtgcttcagtcataatgtcgcgaggattgcccgcccaggtggcatttacaccctacgccccggagcccgggagcacatgccggctcagagaatactatgaccagacagctcagatgtgctgcagcaaatgctcgccgggccaacatgcaaaagtcttctgtaccaagacctcggacaccgtgtgtgactcctgtgaggacagcacatacacccagctctggaactgggttcccgagtgcttgagctgtggctcccgctgtagctctgaccaggtggaaactcaagcctgcactcgggaacagaaccgcatctgcacctgcaggcccggctggtactgcgcgctgagcaagcaggaggggtgccggctgtgcgcgccgctgcgcaagtgccgcccgggcttcggcgtggccagaccaggaactgaaacatcagacgtggtgtgcaagccctgtgccccggggacgttctccaacacgacttcatccacggatatttgcaggccccaccagatctgtaacgtggtggccatccctgggaatgcaagcatggatgcagtctgcacgtccacgtcccccacccggagtatggccccaggggcagtacacttaccccagccagtgtccacacgatcccaacacacgcagccaactccagaacccagcactgctccaagcacctccttcctgctcccaatgggccccagccccccagctgaagggagcactggcgacaccggtgagcccaaatcttctgacaaaactcacacatgcccaccgtgcccagcacctgaagccgcgggtgcaccgtcagtcttcctcttccccccaaaacccaaggacaccctcatgatctcccggacccctgaggtcacatgcgtggtggtggacgtgagccacgaagaccctgaggtcaagttcaactggtacgtggacggcgtggaggtgcataatgccaagacaaagccgcgggaggagcagtacaacagcacgtaccgtgtggtcagcgtcctcaccgtcctgcaccaggactggctgaatggcaaggcgtacgcgtgcgcggtctccaacaaagccctcccagcccccatcgagaaaaccatctccaaagccaaagggcagccccgagaaccacaggtgtacaccctgcccccatcccgggatgagctgaccaagaaccaggtcagcctgacctgcctggtcaaaggcttctatccaagcgacatcgccgtggagtgggagagcaatgggcagccggagaacaactacaagaccacgcctcccgtgctggactccgacggctccttcttcctctacagcaagctcaccgtggacaagagcaggtggcagcaggggaacgtcttctcatgctccgtgatgcatgaggctctgcacaaccactacacgcagaagagcctctccctgtctccgggtcagaggcacaacaattcttccctgaatacaagaactcagaaagcacgtcattctccgaattctgaagttcaattgttagagtctggtggcggtcttgttcagcctggtggttctttacgtctttcttgcgctgcttccggattcactttctctacttacgagatgggttgggttcgccaagctcctggtaaaggtttggagtgggtttctgttatctggtcttctggtggccatacttggtatgctgactccgttaaaggtcgcttcactatctctagagacaactctaagaatactctctacttgcagatgaacagcttaagggctgaggacacggctgtgtattactgtgcgagaagcaatcagggcgatttttggagtggttatccgtttgcttttgatatctggggccaagggacaatggtcaccgtctcaagcggtggcggcggttcggggggtggcggaagtggaggtggagggagtcaagacatccagatgacccagtctccatcttccgtgtctgcatctgtaggagacagagtcaccatcacttgtcgggcgagtcagggtattagcagctggttagcctggtatcagcagaaaccagggaaagcccctaagctcctgatctatgctgcatccagtttgcaaagtggggtcccatcaaggttcagcggcagtggatctgggacagatttcactctcaccatcagcagcctgcagcctgaagattttgcaacttactattgtcaacaggctaacagtttccctctcactttcggcggagggaccaaggtggagatcaaatgagcggccgc

SEQ ID NO: 714 - DNA, 2362 bp, Artificial Sequence
  Made in a lab
tatcgattatacgactcactatagggagacccaagcttgcccccatggattttcaagtgcagattttcagcttcctgctaatcagtgcttcagtcataatgtcgcgaggattgcccgcccaggtggcatttacaccctacgccccggagcccgggagcacatgccggctcagagaatactatgaccagacagctcagatgtgctgcagcaaatgctcgccgggccaacatgcaaaagtcttctgtaccaagacctcggacaccgtgtgtgactcctgtgaggacagcacatacacccagctctggaactgggttcccgagtgcttgagctgtggctcccgctgtagctctgaccaggtggaaactcaagcctgcactcgggaacagaaccgcatctgcacctgcaggcccggctggtactgcgcgctgagcaagcaggaggggtgccggctgtgcgcgccgctgcgcaagtgccgcccgggcttcggcgtggccagaccaggaactgaaacatcagacgtggtgtgcaagccctgtgccccggggacgttctccaacacgacttcatccacggatatttgcaggccccaccagatctgtaacgtggtggccatccctgggaatgcaagcatggatgcagtctgcacgtccacgtcccccacccggagtatggccccaggggcagtacacttaccccagccagtgtccacacgatcccaacacacgcagccaactccagaacccagcactgctccaagcacctccttcctgctcccaatgggccccagccccccagctgaagggagcactggcgacaccggtgagcccaaatcttctgacaaaactcacacatgcccaccgtgcccagcacctgaagccgcgggtgcaccgtcagtcttcctcttccccccaaaacccaaggacaccctcatgatctcccggacccctgaggtcacatgcgtggtggtggacgtgagccacgaagaccctgaggtcaagttcaactggtacgtggacggcgtggaggtgcataatgccaagacaaagccgcgggaggagcagtacaacagcacgtaccgtgtggtcagcgtcctcaccgtcctgcaccaggactggctgaatggcaaggcgtacgcgtgcgcggtctccaacaaagccctcccagcccccatcgagaaaaccatctccaaagccaaagggcagccccgagaaccacaggtgtacaccctgcccccatcccgggatgagctgaccaagaaccaggtcagcctgacctgcctggtcaaaggcttctatccaagcgacatcgccgtggagtgggagagcaatgggcagccggagaacaactacaagaccacgcctcccgtgctggactccgacggctccttcttcctctacagcaagctcaccgtggacaagagcaggtggcagcaggggaacgtcttctcatgctccgtgatgcatgaggctctgcacaaccactacacgcagaagagcctctccctgtctccgggtcagaggcacaacaattcttccctgaatacaagaactcagaaagcacgtcattctccgaattctgaagttcaattgttagagtctggtggcggtcttgttcagcctggtggttctttacgtctttcttgcgctgcttccggattcactttctctaattacaatatgtattgggttcgccaagctcctggtaaaggtttggagtgggtttcttatatctctccttctggtggcatgactaagtatgctgactccgttaaaggtcgcttcactatctctagagacaactctaagaatactctctacttgcagatgaacagcttaagggctgaggacacggccgtatattactgtgcgaggaggggagtgctggggtactacggtatggacgtctggggccaagggacaatggtcaccgtctcaagcggtggcggcggttcggggggtggcggaagtggaggtggagggagtcaagacatccagatgacccagtctccatcctccctgtctgcatctgtaggagacagagtcaccatcacttgccgggcaagtcagagcattagcagctatttaaattggtatcagcagaaaccagggaaagcccctaagctcctgatctatgctgcatccagtttgcaaagtggggtcccatcaaggttcagtggcagtggatctgggacagatttcactctcaccatcagcagtctgcaacctgaagattttgcaacttactactgtcaacagagttacagtaccccgtacacttttggccaggggaccaagctggagatcaaatgagcggccgcctcgagtctagagggccctattctatagtgtcacctaaatgctag

SEQ ID NO: 715 - DNA, 2294 bp, Artificial Sequence
  Made in a lab
aagcttgccgccatggattttcaagtgcagattttcagcttcctgctaatcagtgcttcagtcataatgtcgcgaggattgcccgcccaggtggcatttacaccctacgccccggagcccgggagcacatgccggctcagagaatactatgaccagacagctcagatgtgctgcagcaaatgctcgccgggccaacatgcaaaagtcttctgtaccaagacctcggacaccgtgtgtgactcctgtgaggacagcacatacacccagctctggaactgggttcccgagtgcttgagctgtggctcccgctgtagctctgaccaggtggaaactcaagcctgcactcgggaacagaaccgcatctgcacctgcaggcccggctggtactgcgcgctgagcaagcaggaggggtgccggctgtgcgcgccgctgcgcaagtgccgcccgggcttcggcgtggccagaccaggaactgaaacatcagacgtggtgtgcaagccctgtgccccggggacgttctccaacacgacttcatccacggatatttgcaggccccaccagatctgtaacgtggtggccatccctgggaatgcaagcatggatgcagtctgcacgtccacgtcccccacccggagtatggccccaggggcagtacacttaccccagccagtgtccacacgatcccaacacacgcagccaactccagaacccagcactgctccaagcacctccttcctgctcccaatgggccccagccccccagctgaagggagcactggcgacaccggtgagcccaaatcttctgacaaaactcacacatgcccaccgtgcccagcacctgaagccgcgggtgcaccgtcagtcttcctcttccccccaaaacccaaggacaccctcatgatctcccggacccctgaggtcacatgcgtggtggtggacgtgagccacgaagaccctgaggtcaagttcaactggtacgtggacggcgtggaggtgcataatgccaagacaaagccgcgggaggagcagtacaacagcacgtaccgtgtggtcagcgtcctcaccgtcctgcaccaggactggctgaatggcaaggcgtacgcgtgcgcggtctccaacaaagccctcccagcccccatcgagaaaaccatctccaaagccaaagggcagccccgagaaccacaggtgtacaccctgcccccatcccgggatgagctgaccaagaaccaggtcagcctgacctgcctggtcaaaggcttctatccaagcgacatcgccgtggagtgggagagcaatgggcagccggagaacaactacaagaccacgcctcccgtgctggactccgacggctccttcttcctctacagcaagctcaccgtggacaagagcaggtggcagcaggggaacgtcttctcatgctccgtgatgcatgaggctctgcacaaccactacacgcagaagagcctctccctgtctccgggtcagaggcacaacaattcttccctgaatacaagaactcagaaagcacgtcattctccgaattctgaagttcaattgttagagtctggtggcggtcttgttcagcctggtggttctttacgtctttcttgcgctgcttccggattcactttctctctttactctatgaattgggttcgccaagctcctggtaaaggtttggagtgggtttcttctatctcttcttctggtggcgctactctttatgctgactccgttaaaggtcgcttcactatctctagagacaactctaagaatactctctacttgcagatgaacagcttaagggctgaggacacggccgtgtattactgtgcgagagatcttataagtagtggttattaccctgatgcttttgatatctggggccaagggacaatggtcaccgtctcaagcggtggcggcggttcggggggtggcggaagtggaggtggagggagtcaagatatccagatgacccagtctccaggcaccctgtctttgtctccaggggaaagagccaccctctcctgcagggccagtcagagtgttagcagcagctacttagcctggtaccagcagaaacctggccaggctcccaggctcctcatctatggtgcgtctaatagggtcactggcatccccgacaggttcagtggcagtgggtctgggacagacttcactctcaccatttccagactcgagcctgaagattctgcagtatattactgtcaccaatatggtagccagtacacttttggcccggggaccaagctggagatcaaatgagcggccgc

SEQ ID NO: 716 - DNA, 2308 bp, Artificial Sequence
  Made in a lab
agcttgccgccatggattttcaagtgcagattttcagcttcctgctaatcagtgcttcagtcataatgtcgcgaggattgcccgcccaggtggcatttacaccctacgccccggagcccgggagcacatgccggctcagagaatactatgaccagacagctcagatgtgctgcagcaaatgctcgccgggccaacatgcaaaagtcttctgtaccaagacctcggacaccgtgtgtgactcctgtgaggacagcacatacacccagctctggaactgggttcccgagtgcttgagctgtggctcccgctgtagctctgaccaggtggaaactcaagcctgcactcgggaacagaaccgcatctgcacctgcaggcccggctggtactgcgcgctgagcaagcaggaggggtgccggctgtgcgcgccgctgcgcaagtgccgcccgggcttcggcgtggccagaccaggaactgaaacatcagacgtggtgtgcaagccctgtgccccggggacgttctccaacacgacttcatccacggatatttgcaggccccaccagatctgtaacgtggtggccatccctgggaatgcaagcatggatgcagtctgcacgtccacgtcccccacccggagtatggccccaggggcagtacacttaccccagccagtgtccacacgatcccaacacacgcagccaactccagaacccagcactgctccaagcacctccttcctgctcccaatgggccccagccccccagctgaagggagcactggcgacaccggtgagcccaaatcttctgacaaaactcacacatgcccaccgtgcccagcacctgaagccgcgggtgcaccgtcagtcttcctcttccccccaaaacccaaggacaccctcatgatctcccggacccctgaggtcacatgcgtggtggtggacgtgagccacgaagaccctgaggtcaagttcaactggtacgtggacggcgtggaggtgcataatgccaagacaaagccgcgggaggagcagtacaacagcacgtaccgtgtggtcagcgtcctcaccgtcctgcaccaggactggctgaatggcaaggcgtacgcgtgcgcggtctccaacaaagccctcccagcccccatcgagaaaaccatctccaaagccaaagggcagccccgagaaccacaggtgtacaccctgcccccatcccgggatgagctgaccaagaaccaggtcagcctgacctgcctggtcaaaggcttctatccaagcgacatcgccgtggagtgggagagcaatgggcagccggagaacaactacaagaccacgcctcccgtgctggactccgacggctccttcttcctctacagcaagctcaccgtggacaagagcaggtggcagcaggggaacgtcttctcatgctccgtgatgcatgaggctctgcacaaccactacacgcagaagagcctctccctgtctccgggtcagaggcacaacaattcttccctgaatacaagaactcagaaagcacgtcattctccgaattctgaagttcaattgttagagtctggtggcggtcttgttcagcctggtggttctttacgtctttcttgcgctgcttccggattcactttctctcagtacatgatgcattgggttcgccaagctcctggtaaaggtttggagtgggtttcttctatctcttcttctggtggctggacttcttatgctgactccgttaaaggtagcttcactatctctagagacaactctaagaatactctctacttgcagatgaacagcttaagggctgaggacacggccgtgtattactgtgcgagaccgttagccttgggatacgatttttggagtggttatcaagccgccggctttgactactggggccagggaaccctggtcaccgtctcaagcggtggcggcggttcggggggtggcggaagtggaggtggagggagtcaagacatccagatgacccagtctccatcatctctgtctgcatctgtaggagaccgagtcaccatctcttgccaggcgagtcaacacattagcaactttttaaattggtatcagcagaaaccggggaaagcccctaaactcctgatctacgatacatccaatttgcgatcaggggtcccatcacggttcagtgggagtggctctgggacagattttaccttcaccatcagttccctgcagcctgaagatattgcaacatattactgtcaacagtatgataatttccctctcactttcggcggagggaccaaggtggagatcaaatgagcggccgc

SEQ ID NO: 717 - DNA, 2288 bp, Artificial Sequence
  Made in a lab
aagcttgccgccatggattttcaagtgcagattttcagcttcctgctaatcagtgcttcagtcataatgtcgcgaggattgcccgcccaggtggcatttacaccctacgccccggagcccgggagcacatgccggctcagagaatactatgaccagacagctcagatgtgctgcagcaaatgctcgccgggccaacatgcaaaagtcttctgtaccaagacctcggacaccgtgtgtgactcctgtgaggacagcacatacacccagctctggaactgggttcccgagtgcttgagctgtggctcccgctgtagctctgaccaggtggaaactcaagcctgcactcgggaacagaaccgcatctgcacctgcaggcccggctggtactgcgcgctgagcaagcaggaggggtgccggctgtgcgcgccgctgcgcaagtgccgcccgggcttcggcgtggccagaccaggaactgaaacatcagacgtggtgtgcaagccctgtgccccggggacgttctccaacacgacttcatccacggatatttgcaggccccaccagatctgtaacgtggtggccatccctgggaatgcaagcatggatgcagtctgcacgtccacgtcccccacccggagtatggccccaggggcagtacacttaccccagccagtgtccacacgatcccaacacacgcagccaactccagaacccagcactgctccaagcacctccttcctgctcccaatgggccccagccccccagctgaagggagcactggcgacaccggtgagcccaaatcttctgacaaaactcacacatgcccaccgtgcccagcacctgaagccgcgggtgcaccgtcagtcttcctcttccccccaaaacccaaggacaccctcatgatctcccggacccctgaggtcacatgcgtggtggtggacgtgagccacgaagaccctgaggtcaagttcaactggtacgtggacggcgtggaggtgcataatgccaagacaaagccgcgggaggagcagtacaacagcacgtaccgtgtggtcagcgtcctcaccgtcctgcaccaggactggctgaatggcaaggcgtacgcgtgcgcggtctccaacaaagccctcccagcccccatcgagaaaaccatctccaaagccaaagggcagccccgagaaccacaggtgtacaccctgcccccatcccgggatgagctgaccaagaaccaggtcagcctgacctgcctggtcaaaggcttctatccaagcgacatcgccgtggagtgggagagcaatgggcagccggagaacaactacaagaccacgcctcccgtgctggactccgacggctccttcttcctctacagcaagctcaccgtggacaagagcaggtggcagcaggggaacgtcttctcatgctccgtgatgcatgaggctctgcacaaccactacacgcagaagagcctctccctgtctccgggtcagaggcacaacaattcttccctgaatacaagaactcagaaagcacgtcattctccgaattctgaagttcaattgttagagtctggtggcggtcttgttcagcctggtggttctttacgtctttcttgcgctgcttccggattcactttctcttggtactctatgatttgggttcgccaagctcctggtaaaggtttggagtgggtttcttctatcgttccttctggtggccttacttggtatgctgactccgttaaaggtcgcttcactatctctagagacaactctaagaatactctctacttgcagatgaacagcttaagggctgaggacacggccgtgtattactgtgcgagagatgtctacggtgactactactttgacaactggggccagggcaccctggtcaccgtctcaagcggtggcggcggttcggggggtggcggaagtggaggtggagggagtcagagcgaattgactcagccaccctcggtgtctgaagcccccgggcagagggtcaccatctcctgttctggaagcacctccaacatcggaaataatgctgtaatctggtaccagcagctcccaggaaaggctcccaaactcctcatctattatgatgatctgctgccctcaggggtctctgaccgattctctggctccaagtctggcacctcaggctccctggccatcagtgggctccagtctgaggatgaggctgactattactgtgcatcatgggatgacaacctgaatggtccgctgttcggcggagggaccaagctgaccgtcctatgagcggccgc

SEQ ID NO: 718 - DNA, 2282 bp, Artificial Sequence
  Made in a lab
aagcttgccgccatggattttcaagtgcagattttcagcttcctgctaatcagtgcttcagtcataatgtcgcgaggattgcccgcccaggtggcatttacaccctacgccccggagcccgggagcacatgccggctcagagaatactatgaccagacagctcagatgtgctgcagcaaatgctcgccgggccaacatgcaaaagtcttctgtaccaagacctcggacaccgtgtgtgactcctgtgaggacagcacatacacccagctctggaactgggttcccgagtgcttgagctgtggctcccgctgtagctctgaccaggtggaaactcaagcctgcactcgggaacagaaccgcatctgcacctgcaggcccggctggtactgcgcgctgagcaagcaggaggggtgccggctgtgcgcgccgctgcgcaagtgccgcccgggcttcggcgtggccagaccaggaactgaaacatcagacgtggtgtgcaagccctgtgccccggggacgttctccaacacgacttcatccacggatatttgcaggccccaccagatctgtaacgtggtggccatccctgggaatgcaagcatggatgcagtctgcacgtccacgtcccccacccggagtatggccccaggggcagtacacttaccccagccagtgtccacacgatcccaacacacgcagccaactccagaacccagcactgctccaagcacctccttcctgctcccaatgggccccagccccccagctgaagggagcactggcgacaccggtgagcccaaatcttctgacaaaactcacacatgcccaccgtgcccagcacctgaagccgcgggtgcaccgtcagtcttcctcttccccccaaaacccaaggacaccctcatgatctcccggacccctgaggtcacatgcgtggtggtggacgtgagccacgaagaccctgaggtcaagttcaactggtacgtggacggcgtggaggtgcataatgccaagacaaagccgcgggaggagcagtacaacagcacgtaccgtgtggtcagcgtcctcaccgtcctgcaccaggactggctgaatggcaaggcgtacgcgtgcgcggtctccaacaaagccctcccagcccccatcgagaaaaccatctccaaagccaaagggcagccccgagaaccacaggtgtacaccctgcccccatcccgggatgagctgaccaagaaccaggtcagcctgacctgcctggtcaaaggcttctatccaagcgacatcgccgtggagtgggagagcaatgggcagccggagaacaactacaagaccacgcctcccgtgctggactccgacggctccttcttcctctacagcaagctcaccgtggacaagagcaggtggcagcaggggaacgtcttctcatgctccgtgatgcatgaggctctgcacaaccactacacgcagaagagcctctccctgtctccgggtcagaggcacaacaattcttccctgaatacaagaactcagaaagcacgtcattctccgaattctgaagttcaattgttagagtctggtggcggtcttgttcagcctggtggttctttacgtctttcttgcgctgcttccggattcactttctcttattacaatatgacttgggttcgccaagctcctggtaaaggtttggagtgggtttcttctatctctccttctggtggccgtactggttatgctgactccgttaaaggtcgcttcactatctctagagacaactctaagaatactctctacttgcagatgaacagcttaagggctgaggacacggccgtgtattactgtgcgagagtaagtggcttctacgcagcgtttgattactggggccagggaaccctggtcaccgtctcaagcggtggcggcggttcggggggtggcggaagtggaggtggagggagtcaagacatccagatgacccagtctccttccaccctgtctgcatctgtaggagacagagtcaccatcacctgccgggccagtcagagtattagtagttggttggcctggtatcagcagaaaccagggaaagcccctaagctcctgatctatcaggcgtctactttagaaagtggggtcccatcaaggttcagcggcagtggatctgggacagatttcactctcactatcagcagcctacaacctgaagactttgcaacttattattgtcaacaggctaacagttttccgatcactttcggcggagggaccaaagtggagatcaactgagcggccgc

SEQ ID NO: 719 - DNA, 2285 bp, Artificial Sequence
  Made in a lab
aagcttgccgccatggattttcaagtgcagattttcagcttcctgctaatcagtgcttcagtcataatgtcgcgaggattgcccgcccaggtggcatttacaccctacgccccggagcccgggagcacatgccggctcagagaatactatgaccagacagctcagatgtgctgcagcaaatgctcgccgggccaacatgcaaaagtcttctgtaccaagacctcggacaccgtgtgtgactcctgtgaggacagcacatacacccagctctggaactgggttcccgagtgcttgagctgtggctcccgctgtagctctgaccaggtggaaactcaagcctgcactcgggaacagaaccgcatctgcacctgcaggcccggctggtactgcgcgctgagcaagcaggaggggtgccggctgtgcgcgccgctgcgcaagtgccgcccgggcttcggcgtggccagaccaggaactgaaacatcagacgtggtgtgcaagccctgtgccccggggacgttctccaacacgacttcatccacggatatttgcaggccccaccagatctgtaacgtggtggccatccctgggaatgcaagcatggatgcagtctgcacgtccacgtcccccacccggagtatggccccaggggcagtacacttaccccagccagtgtccacacgatcccaacacacgcagccaactccagaacccagcactgctccaagcacctccttcctgctcccaatgggccccagccccccagctgaagggagcactggcgacaccggtgagcccaaatcttctgacaaaactcacacatgcccaccgtgcccagcacctgaagccgcgggtgcaccgtcagtcttcctcttccccccaaaacccaaggacaccctcatgatctcccggacccctgaggtcacatgcgtggtggtggacgtgagccacgaagaccctgaggtcaagttcaactggtacgtggacggcgtggaggtgcataatgccaagacaaagccgcgggaggagcagtacaacagcacgtaccgtgtggtcagcgtcctcaccgtcctgcaccaggactggctgaatggcaaggcgtacgcgtgcgcggtctccaacaaagccctcccagcccccatcgagaaaaccatctccaaagccaaagggcagccccgagaaccacaggtgtacaccctgcccccatcccgggatgagctgaccaagaaccaggtcagcctgacctgcctggtcaaaggcttctatccaagcgacatcgccgtggagtgggagagcaatgggcagccggagaacaactacaagaccacgcctcccgtgctggactccgacggctccttcttcctctacagcaagctcaccgtggacaagagcaggtggcagcaggggaacgtcttctcatgctccgtgatgcatgaggctctgcacaaccactacacgcagaagagcctctccctgtctccgggtcagaggcacaacaattcttccctgaatacaagaactcagaaagcacgtcattctccgaattctgaagttcaattgttagagtctggtggcggtcttgttcagcctggtggttctttacgtctttcttgcgctgcttccggattcactttctcttggtactggatgacttgggttcgccaagctcctggtaaaggtttggagtgggtttcttctatccctccttctggtggccatacttcttatgctgactccgttaaaggtcgcttcactatctctagagacaactctaagaatactctctacttgcagatgaacagcttaagggctgaggacacggccgtgtattactgtgctaaaagcagtggctggtacgaggactactttgactactggggccagggaaccctggtcaccgtctcaagcggtggcggcggttcggggggtggcggaagtggaggtggagggagtcaagacatccagatgacccagtctccatcctccctgtctgcctctgtaggagacagagtcaccatcacttgccaggcgagtcaagatattaccaactatttaaattggtatctgcataaaccagggaaagcccctaagctcctgatctacgacgcatccaacttgcaaacaggggtcccatcaaggttcagtggaagtggatctgggacagattttactttcaccatcactagcctgcagcctgaagattttggaacatattactgtcaacagtatgatactttacatccctctttcggccctgggaccacagtggatatcaaatgagcggccgc

SEQ ID NO: 720 - DNA, 2300 bp, Artificial Sequence
  Made in a lab
aagcttgccgccatggattttcaagtgcagattttcagcttcctgctaatcagtgcttcagtcataatgtcgcgaggattgcccgcccaggtggcatttacaccctacgccccggagcccgggagcacatgccggctcagagaatactatgaccagacagctcagatgtgctgcagcaaatgctcgccgggccaacatgcaaaagtcttctgtaccaagacctcggacaccgtgtgtgactcctgtgaggacagcacatacacccagctctggaactgggttcccgagtgcttgagctgtggctcccgctgtagctctgaccaggtggaaactcaagcctgcactcgggaacagaaccgcatctgcacctgcaggcccggctggtactgcgcgctgagcaagcaggaggggtgccggctgtgcgcgccgctgcgcaagtgccgcccgggcttcggcgtggccagaccaggaactgaaacatcagacgtggtgtgcaagccctgtgccccggggacgttctccaacacgacttcatccacggatatttgcaggccccaccagatctgtaacgtggtggccatccctgggaatgcaagcatggatgcagtctgcacgtccacgtcccccacccggagtatggccccaggggcagtacacttaccccagccagtgtccacacgatcccaacacacgcagccaactccagaacccagcactgctccaagcacctccttcctgctcccaatgggccccagccccccagctgaagggagcactggcgacaccggtgagcccaaatcttctgacaaaactcacacatgcccaccgtgcccagcacctgaagccgcgggtgcaccgtcagtcttcctcttccccccaaaacccaaggacaccctcatgatctcccggacccctgaggtcacatgcgtggtggtggacgtgagccacgaagaccctgaggtcaagttcaactggtacgtggacggcgtggaggtgcataatgccaagacaaagccgcgggaggagcagtacaacagcacgtaccgtgtggtcagcgtcctcaccgtcctgcaccaggactggctgaatggcaaggcgtacgcgtgcgcggtctccaacaaagccctcccagcccccatcgagaaaaccatctccaaagccaaagggcagccccgagaaccacaggtgtacaccctgcccccatcccgggatgagctgaccaagaaccaggtcagcctgacctgcctggtcaaaggcttctatccaagcgacatcgccgtggagtgggagagcaatgggcagccggagaacaactacaagaccacgcctcccgtgctggactccgacggctccttcttcctctacagcaagctcaccgtggacaagagcaggtggcagcaggggaacgtcttctcatgctccgtgatgcatgaggctctgcacaaccactacacgcagaagagcctctccctgtctccgggtcagaggcacaacaattcttccctgaatacaagaactcagaaagcacgtcattctccgaattctgaagttcaattgttagagtctggtggcggtcttgttcagcctggtggttctttacgtctttcttgcgctgcttccggattcactttctctccttacgagatggcttgggttcgccaagctcctggtaaaggtttggagtgggtttctgttatcggtccttctggtggctatactgagtatgctgactccgttaaaggtcgcttcactatctctagagacaactctaagaatactctctacttgcagatgaacagcttaagggctgaggacacggccgtgtattactgtgcgagaggctacgatttttggagtggttattatgatgcttttgatatctggggccaagggacaatggtcaccgtctcaagcggtggcggcggttcggggggtggcggaagtggaggtggagggagtcagagcgctttgactcagccaccctccgcgtccgggtctcctggacaatcagtcaccatctcctgcactggaaccagcagtgacgttggtgtttatgactctgtctcctggtaccaacaacaccctggcaaggcccccaaactcatgatttacgatgtcagtgatcggccctcaggtgtttctaatcggttctctggctccaagtctggctacacggcctccctgaccatctctgcgctccaggctgaggacgaggctgattattattgcggctcatatcgagccagcagctcctatgtcttcgggactgggaccaaggtcaccgtcctatgagcggccgc

SEQ ID NO: 721 - DNA, 2282 bp, Artificial Sequence
  Made in a lab
aagcttgccgccatggattttcaagtgcagattttcagcttcctgctaatcagtgcttcagtcataatgtcgcgaggattgcccgcccaggtggcatttacaccctacgccccggagcccgggagcacatgccggctcagagaatactatgaccagacagctcagatgtgctgcagcaaatgctcgccgggccaacatgcaaaagtcttctgtaccaagacctcggacaccgtgtgtgactcctgtgaggacagcacatacacccagctctggaactgggttcccgagtgcttgagctgtggctcccgctgtagctctgaccaggtggaaactcaagcctgcactcgggaacagaaccgcatctgcacctgcaggcccggctggtactgcgcgctgagcaagcaggaggggtgccggctgtgcgcgccgctgcgcaagtgccgcccgggcttcggcgtggccagaccaggaactgaaacatcagacgtggtgtgcaagccctgtgccccggggacgttctccaacacgacttcatccacggatatttgcaggccccaccagatctgtaacgtggtggccatccctgggaatgcaagcatggatgcagtctgcacgtccacgtcccccacccggagtatggccccaggggcagtacacttaccccagccagtgtccacacgatcccaacacacgcagccaactccagaacccagcactgctccaagcacctccttcctgctcccaatgggccccagccccccagctgaagggagcactggcgacaccggtgagcccaaatcttctgacaaaactcacacatgcccaccgtgcccagcacctgaagccgcgggtgcaccgtcagtcttcctcttccccccaaaacccaaggacaccctcatgatctcccggacccctgaggtcacatgcgtggtggtggacgtgagccacgaagaccctgaggtcaagttcaactggtacgtggacggcgtggaggtgcataatgccaagacaaagccgcgggaggagcagtacaacagcacgtaccgtgtggtcagcgtcctcaccgtcctgcaccaggactggctgaatggcaaggcgtacgcgtgcgcggtctccaacaaagccctcccagcccccatcgagaaaaccatctccaaagccaaagggcagccccgagaaccacaggtgtacaccctgcccccatcccgggatgagctgaccaagaaccaggtcagcctgacctgcctggtcaaaggcttctatccaagcgacatcgccgtggagtgggagagcaatgggcagccggagaacaactacaagaccacgcctcccgtgctggactccgacggctccttcttcctctacagcaagctcaccgtggacaagagcaggtggcagcaggggaacgtcttctcatgctccgtgatgcatgaggctctgcacaaccactacacgcagaagagcctctccctgtctccgggtcagaggcacaacaattcttccctgaatacaagaactcagaaagcacgtcattctccgaattctgaagttcaattgttagagtctggtggcggtcttgttcagcctggtggttctttacgtctttcttgcgctgcttccggattcactttctcttcttactttatgggttgggttcgccaagctcctggtaaaggtttggagtgggtttcttctatctggccttctggtggcaatactacttatgctgactccgttaaaggtcgcttcactatctctagagacaactctaagaatactctctacttgcagatgaacagcttaagggctgaggacacggccgtgtattactgtgcgagacatgttggctggggacgctactttgactactggggccagggaaccctggtcaccgtctcaagcggtggcggcggttcggggggtggcggaagtggaggtggagggagtcaagacatccagatgacccagtctccatcctccctgtctgcatctgttggagacagagtcaccatcacttgccgggcaagtcagaacatttaccactatttacattggtatcagcagaaacccgggaaggcccctaaactcctgatctatgctgcatccactttggaaagtggggtcccatcaaggttcagtggcagtggatctgggacagatctcactctcaccatcaacagtctgcaacctgaagattttgcaacttattactgtcaacagacttacgatacccccctcactttcggcggagggagtaaggtggaggtcaaatgagcggccgc

SEQ ID NO: 722 - DNA, 2294 bp, Artificial Sequence
  Made in a lab
aagcttgccgccatggattttcaagtgcagattttcagcttcctgctaatcagtgcttcagtcataatgtcgcgaggattgcccgcccaggtggcatttacaccctacgccccggagcccgggagcacatgccggctcagagaatactatgaccagacagctcagatgtgctgcagcaaatgctcgccgggccaacatgcaaaagtcttctgtaccaagacctcggacaccgtgtgtgactcctgtgaggacagcacatacacccagctctggaactgggttcccgagtgcttgagctgtggctcccgctgtagctctgaccaggtggaaactcaagcctgcactcgggaacagaaccgcatctgcacctgcaggcccggctggtactgcgcgctgagcaagcaggaggggtgccggctgtgcgcgccgctgcgcaagtgccgcccgggcttcggcgtggccagaccaggaactgaaacatcagacgtggtgtgcaagccctgtgccccggggacgttctccaacacgacttcatccacggatatttgcaggccccaccagatctgtaacgtggtggccatccctgggaatgcaagcatggatgcagtctgcacgtccacgtcccccacccggagtatggccccaggggcagtacacttaccccagccagtgtccacacgatcccaacacacgcagccaactccagaacccagcactgctccaagcacctccttcctgctcccaatgggccccagccccccagctgaagggagcactggcgacaccggtgagcccaaatcttctgacaaaactcacacatgcccaccgtgcccagcacctgaagccgcgggtgcaccgtcagtcttcctcttccccccaaaacccaaggacaccctcatgatctcccggacccctgaggtcacatgcgtggtggtggacgtgagccacgaagaccctgaggtcaagttcaactggtacgtggacggcgtggaggtgcataatgccaagacaaagccgcgggaggagcagtacaacagcacgtaccgtgtggtcagcgtcctcaccgtcctgcaccaggactggctgaatggcaaggcgtacgcgtgcgcggtctccaacaaagccctcccagcccccatcgagaaaaccatctccaaagccaaagggcagccccgagaaccacaggtgtacaccctgcccccatcccgggatgagctgaccaagaaccaggtcagcctgacctgcctggtcaaaggcttctatccaagcgacatcgccgtggagtgggagagcaatgggcagccggagaacaactacaagaccacgcctcccgtgctggactccgacggctccttcttcctctacagcaagctcaccgtggacaagagcaggtggcagcaggggaacgtcttctcatgctccgtgatgcatgaggctctgcacaaccactacacgcagaagagcctctccctgtctccgggtcagaggcacaacaattcttccctgaatacaagaactcagaaagcacgtcattctccgaattctgaagttcaattgttagagtctggtggcggtcttgttcagcctggtggttctttacgtctttcttgcgctgcttccggattcactttctctgcttaccgtatgatttgggttcgccaagctcctggtaaaggtttggagtgggtttcttatatctcttcttctggtggccgtactgattatgctgactccgttaaaggtcgcttcactatctctagagacaactctaagaatactctctacttgcagatgaacagcttaagggctgaggacacagccgtgtattactgtaccacaggagggttacgatattttgactggttagccccctccatggactactggggccagggaaccctggtcaccgtctcaagcggtggcggcggttcggggggtggcggaagtggaggtggagggagtcagagcgctttgactcagccaccctcagtgtccgtgtccccaggacagacagccagcatcacctgttctggagataaattgggggaaaaatttgcttcttggtatcagcagaggccaggccagtcccctatactggtcatctatcaagattccaagcggccctccgggatccctgagcgattctctggctccaactctgggaacacagccactctgaccatcagcgggacccagactatggatgaggctgactattactgtcaggcgtggggcggcagcactgcatacgtcttcggcagtgggaccaaggtcaccgtcctatgagcggccgc

SEQ ID NO: 723 - DNA, 2279 bp, Artificial Sequence
  Made in a lab
aagcttgccgccatggattttcaagtgcagattttcagcttcctgctaatcagtgcttcagtcataatgtcgcgaggattgcccgcccaggtggcatttacaccctacgccccggagcccgggagcacatgccggctcagagaatactatgaccagacagctcagatgtgctgcagcaaatgctcgccgggccaacatgcaaaagtcttctgtaccaagacctcggacaccgtgtgtgactcctgtgaggacagcacatacacccagctctggaactgggttcccgagtgcttgagctgtggctcccgctgtagctctgaccaggtggaaactcaagcctgcactcgggaacagaaccgcatctgcacctgcaggcccggctggtactgcgcgctgagcaagcaggaggggtgccggctgtgcgcgccgctgcgcaagtgccgcccgggcttcggcgtggccagaccaggaactgaaacatcagacgtggtgtgcaagccctgtgccccggggacgttctccaacacgacttcatccacggatatttgcaggccccaccagatctgtaacgtggtggccatccctgggaatgcaagcatggatgcagtctgcacgtccacgtcccccacccggagtatggccccaggggcagtacacttaccccagccagtgtccacacgatcccaacacacgcagccaactccagaacccagcactgctccaagcacctccttcctgctcccaatgggccccagccccccagctgaagggagcactggcgacaccggtgagcccaaatcttctgacaaaactcacacatgcccaccgtgcccagcacctgaagccgcgggtgcaccgtcagtcttcctcttccccccaaaacccaaggacaccctcatgatctcccggacccctgaggtcacatgcgtggtggtggacgtgagccacgaagaccctgaggtcaagttcaactggtacgtggacggcgtggaggtgcataatgccaagacaaagccgcgggaggagcagtacaacagcacgtaccgtgtggtcagcgtcctcaccgtcctgcaccaggactggctgaatggcaaggcgtacgcgtgcgcggtctccaacaaagccctcccagcccccatcgagaaaaccatctccaaagccaaagggcagccccgagaaccacaggtgtacaccctgcccccatcccgggatgagctgaccaagaaccaggtcagcctgacctgcctggtcaaaggcttctatccaagcgacatcgccgtggagtgggagagcaatgggcagccggagaacaactacaagaccacgcctcccgtgctggactccgacggctccttcttcctctacagcaagctcaccgtggacaagagcaggtggcagcaggggaacgtcttctcatgctccgtgatgcatgaggctctgcacaaccactacacgcagaagagcctctccctgtctccgggtcagaggcacaacaattcttccctgaatacaagaactcagaaagcacgtcattctccgaattctgaagttcaattgttagagtctggtggcggtcttgttcagcctggtggttctttacgtctttcttgcgctgcttccggattcactttctctgcttactctatggtttgggttcgccaagctcctggtaaaggtttggagtgggtttcttatatctatccttctggtggcattactacttatgctgactccgttaaaggtcgcttcactatctctagagacaactctaagaatactctctacttgcagatgaacagcttaagggctgaggacacggctgtgtattactgtgcgagagagggccaggtttttgatatctggggccaagggaccacggtcaccgtctcaagcggtggcggcggttcggggggtggcggaagtggaggtggagggagtcaagacatccagatgacccagtctccagccaccctgtctttgtctccaggggaaagagccaccctctcctgcagggccagtcagagtgttaccacctacttagcctggtaccaacagagacctggccaggctcccaggctcctcatctatgatgcatccaacagggccactggcatcccagccaggttcagtggcagtgggtctgggacagacttcactctcaccatcagcagcgtagagcctgaagattatgcagtttattactgtcagcagcgtagcaactggcctccttcgatcaccttcggccaagggacacgactggagagtaagtgagcggccgc

SEQ ID NO: 724 - DNA, 2285 bp, Artificial Sequence
  Made in a lab
aagcttgccgccatggattttcaagtgcagattttcagcttcctgctaatcagtgcttcagtcataatgtcgcgaggattgcccgcccaggtggcatttacaccctacgccccggagcccgggagcacatgccggctcagagaatactatgaccagacagctcagatgtgctgcagcaaatgctcgccgggccaacatgcaaaagtcttctgtaccaagacctcggacaccgtgtgtgactcctgtgaggacagcacatacacccagctctggaactgggttcccgagtgcttgagctgtggctcccgctgtagctctgaccaggtggaaactcaagcctgcactcgggaacagaaccgcatctgcacctgcaggcccggctggtactgcgcgctgagcaagcaggaggggtgccggctgtgcgcgccgctgcgcaagtgccgcccgggcttcggcgtggccagaccaggaactgaaacatcagacgtggtgtgcaagccctgtgccccggggacgttctccaacacgacttcatccacggatatttgcaggccccaccagatctgtaacgtggtggccatccctgggaatgcaagcatggatgcagtctgcacgtccacgtcccccacccggagtatggccccaggggcagtacacttaccccagccagtgtccacacgatcccaacacacgcagccaactccagaacccagcactgctccaagcacctccttcctgctcccaatgggccccagccccccagctgaagggagcactggcgacaccggtgagcccaaatcttctgacaaaactcacacatgcccaccgtgcccagcacctgaagccgcgggtgcaccgtcagtcttcctcttccccccaaaacccaaggacaccctcatgatctcccggacccctgaggtcacatgcgtggtggtggacgtgagccacgaagaccctgaggtcaagttcaactggtacgtggacggcgtggaggtgcataatgccaagacaaagccgcgggaggagcagtacaacagcacgtaccgtgtggtcagcgtcctcaccgtcctgcaccaggactggctgaatggcaaggcgtacgcgtgcgcggtctccaacaaagccctcccagcccccatcgagaaaaccatctccaaagccaaagggcagccccgagaaccacaggtgtacaccctgcccccatcccgggatgagctgaccaagaaccaggtcagcctgacctgcctggtcaaaggcttctatccaagcgacatcgccgtggagtgggagagcaatgggcagccggagaacaactacaagaccacgcctcccgtgctggactccgacggctccttcttcctctacagcaagctcaccgtggacaagagcaggtggcagcaggggaacgtcttctcatgctccgtgatgcatgaggctctgcacaaccactacacgcagaagagcctctccctgtctccgggtcagaggcacaacaattcttccctgaatacaagaactcagaaagcacgtcattctccgaattctgaagttcaattgttagagtctggtggcggtcttgttcagcctggtggttctttacgtctttcttgcgctgcttccggattcactttctctaattacgctatgggttgggttcgccaagctcctggtaaaggtttggagtgggtttctcgtatcgttccttctggtggcatgacttcttatgctgactccgttaaaggtcgcttcactatctctagagacaactctaagaatactctctacttgcagatgaacagcttaagggctgaggacacagccgtgtattactgtaccacagatgatttttggtccggtatggacgtctggggccaagggaccacggtcaccgtctcaagcggtggcggcggttcggggggtggcggaagtggaggtggagggagtcagagcgctttgactcagcctgcctccgtgtctgggtctcctggacagtcgatcaccatctcctgcactggaaccagcagtgatgttgggagttataaccttgtctcctggtaccaacagcacccaggcaaagcccccaaagtcatgatttatgagggcagtaagcggccctcaggggtttctaatcgcttctctggctccaagtctggcaacacggcctccctgacaatctctgggctccaggctgaggacgaggctgattattactgctgctcatatgcaggtcgtagcacttatgtcttcggaactgggaccaaggtcaccgtcctatgagcggccgc

SEQ ID NO: 725 - DNA, 2285 bp, Artificial Sequence
  Made in a lab
aagcttgccgccatggattttcaagtgcagattttcagcttcctgctaatcagtgcttcagtcataatgtcgcgaggattgcccgcccaggtggcatttacaccctacgccccggagcccgggagcacatgccggctcagagaatactatgaccagacagctcagatgtgctgcagcaaatgctcgccgggccaacatgcaaaagtcttctgtaccaagacctcggacaccgtgtgtgactcctgtgaggacagcacatacacccagctctggaactgggttcccgagtgcttgagctgtggctcccgctgtagctctgaccaggtggaaactcaagcctgcactcgggaacagaaccgcatctgcacctgcaggcccggctggtactgcgcgctgagcaagcaggaggggtgccggctgtgcgcgccgctgcgcaagtgccgcccgggcttcggcgtggccagaccaggaactgaaacatcagacgtggtgtgcaagccctgtgccccggggacgttctccaacacgacttcatccacggatatttgcaggccccaccagatctgtaacgtggtggccatccctgggaatgcaagcatggatgcagtctgcacgtccacgtcccccacccggagtatggccccaggggcagtacacttaccccagccagtgtccacacgatcccaacacacgcagccaactccagaacccagcactgctccaagcacctccttcctgctcccaatgggccccagccccccagctgaagggagcactggcgacaccggtgagcccaaatcttctgacaaaactcacacatgcccaccgtgcccagcacctgaagccgcgggtgcaccgtcagtcttcctcttccccccaaaacccaaggacaccctcatgatctcccggacccctgaggtcacatgcgtggtggtggacgtgagccacgaagaccctgaggtcaagttcaactggtacgtggacggcgtggaggtgcataatgccaagacaaagccgcgggaggagcagtacaacagcacgtaccgtgtggtcagcgtcctcaccgtcctgcaccaggactggctgaatggcaaggcgtacgcgtgcgcggtctccaacaaagccctcccagcccccatcgagaaaaccatctccaaagccaaagggcagccccgagaaccacaggtgtacaccctgcccccatcccgggatgagctgaccaagaaccaggtcagcctgacctgcctggtcaaaggcttctatccaagcgacatcgccgtggagtgggagagcaatgggcagccggagaacaactacaagaccacgcctcccgtgctggactccgacggctccttcttcctctacagcaagctcaccgtggacaagagcaggtggcagcaggggaacgtcttctcatgctccgtgatgcatgaggctctgcacaaccactacacgcagaagagcctctccctgtctccgggtcagaggcacaacaattcttccctgaatacaagaactcagaaagcacgtcattctccgaattctgaagttcaattgttagagtctggtggcggtcttgttcagcctggtggttcttcacgtctttcttgcgctgcttccggattcactttctctctttacaatatgcagtgggttcgccaagctcctggtaaaggtttggagtgggtttctggtatctctctttctggtggcaagactttttatgctgactccgttaaaggtcgcttcactatctctagagacaactctaagaatactctctacttgcagatgaacagcttaagggctgaggacacggccgtgtattactgtgcgagagattacggggtggctacgctagatgcttttgatatctggggccaagggacaatggtcaccgtctcaagcggtggcggcggttcggggggtggcggaagtggaggtggagggagtcagagcgaattgactcagacaccctctgtgtccgtgtccccaggacagacagccagcatcacctgctctggaaatagattggaggataagtatgttcactggtatcagcagaagccaggccagtcccctgtgttggtcctctatcaagacaacaagcggccctccgggatccctgagcgattctctggctccaactctgggaacacagccactctgaccatcagcgagacccagactttggatgaggctgactattactgtcaggcgtgggacagcagcactcgtgaggttttcggcggagggaccaagctgaccgtcctatgagcggccgc

SEQ ID NO: 726 - DNA, 2306 bp, Artificial Sequence
  Made in a lab
aagcttgccgccatggattttcaagtgcagattttcagcttcctgctaatcagtgcttcagtcataatgtcgcgaggattgcccgcccaggtggcatttacaccctacgccccggagcccgggagcacatgccggctcagagaatactatgaccagacagctcagatgtgctgcagcaaatgctcgccgggccaacatgcaaaagtcttctgtaccaagacctcggacaccgtgtgtgactcctgtgaggacagcacatacacccagctctggaactgggttcccgagtgcttgagctgtggctcccgctgtagctctgaccaggtggaaactcaagcctgcactcgggaacagaaccgcatctgcacctgcaggcccggctggtactgcgcgctgagcaagcaggaggggtgccggctgtgcgcgccgctgcgcaagtgccgcccgggcttcggcgtggccagaccaggaactgaaacatcagacgtggtgtgcaagccctgtgccccggggacgttctccaacacgacttcatccacggatatttgcaggccccaccagatctgtaacgtggtggccatccctgggaatgcaagcatggatgcagtctgcacgtccacgtcccccacccggagtatggccccaggggcagtacacttaccccagccagtgtccacacgatcccaacacacgcagccaactccagaacccagcactgctccaagcacctccttcctgctcccaatgggccccagccccccagctgaagggagcactggcgacaccggtgagcccaaatcttctgacaaaactcacacatgcccaccgtgcccagcacctgaagccgcgggtgcaccgtcagtcttcctcttccccccaaaacccaaggacaccctcatgatctcccggacccctgaggtcacatgcgtggtggtggacgtgagccacgaagaccctgaggtcaagttcaactggtacgtggacggcgtggaggtgcataatgccaagacaaagccgcgggaggagcagtacaacagcacgtaccgtgtggtcagcgtcctcaccgtcctgcaccaggactggctgaatggcaaggcgtacgcgtgcgcggtctccaacaaagccctcccagcccccatcgagaaaaccatctccaaagccaaagggcagccccgagaaccacaggtgtacaccctgcccccatcccgggatgagctgaccaagaaccaggtcagcctgacctgcctggtcaaaggcttctatccaagcgacatcgccgtggagtgggagagcaatgggcagccggagaacaactacaagaccacgcctcccgtgctggactccgacggctccttcttcctctacagcaagctcaccgtggacaagagcaggtggcagcaggggaacgtcttctcatgctccgtgatgcatgaggctctgcacaaccactacacgcagaagagcctctccctgtctccgggtcagaggcacaacaattcttccctgaatacaagaactcagaaagcacgtcattctccgaattctgaagttcaattgttagagtctggtggcggtcttgttcagcctggtggttctttacgtctttcttgcgctgcttccggattcactttctctgcttacactatgcattgggttcgccaagctcctggtaaaggtttggagtgggtttcttctatctatccttctggtggcactactccttatgctgactccgttaaaggtcgcttcactatctctagagacaactctaagaatactctctacttgcagatgaacagcttaagggctgaggacacagccacatattactgtgccagagtggtgaatatcgatttttggagtggttacaatatgcggagtgcttttgatatctggggccaagggacaatggtcaccgtctcaagcggtggcggcggttcagggggtggcggaagtggaggtggagggagtcaagacatccagatgacccagtctccatcctccgtgtctgcgtctgtaggagacacagtcaccatcacttgtcgggcgagtcagggtgttagcgactggttagcctggtatcagcagaagccagggaaagcccctaacctcctaatctatggtgcatccagtctgcaaactggggtcccatcacggttcagcggcggtggatccgggacagatttcactctcaccatcagtagcctgcagcctgaggattttgcaacttactattgtcaacaggctcacagtttccctttcactttcggcggagggaccagggtggaaatcaaatgagcggccgc

SEQ ID NO: 727 - DNA, 2383 bp, Artificial Sequence
  Made in a lab
tactggcttatcgaattaatacgactcactatagggagacccaagcttgccgccatggattttcaagtgcagattttcagcttcctgctaatcagtgcttcagtcataatgtcgcgaggattgcccgcccaggtggcatttacaccctacgccccggagcccgggagcacatgccggctcagagaatactatgaccagacagctcagatgtgctgcagcaaatgctcgccgggccaacatgcaaaagtcttctgtaccaagacctcggacaccgtgtgtgactcctgtgaggacagcacatacacccagctctggaactgggttcccgagtgcttgagctgtggctcccgctgtagctctgaccaggtggaaactcaagcctgcactcgggaacagaaccgcatctgcacctgcaggcccggctggtactgcgcgctgagcaagcaggaggggtgccggctgtgcgcgccgctgcgcaagtgccgcccgggcttcggcgtggccagaccaggaactgaaacatcagacgtggtgtgcaagccctgtgccccggggacgttctccaacacgacttcatccacggatatttgcaggccccaccagatctgtaacgtggtggccatccctgggaatgcaagcatggatgcagtctgcacgtccacgtcccccacccggagtatggccccaggggcagtacacttaccccagccagtgtccacacgatcccaacacacgcagccaactccagaacccagcactgctccaagcacctccttcctgctcccaatgggccccagccccccagctgaagggagcactggcgacaccggtgagcccaaatcttctgacaaaactcacacatgcccaccgtgcccagcacctgaagccgcgggtgcaccgtcagtcttcctcttccccccaaaacccaaggacaccctcatgatctcccggacccctgaggtcacatgcgtggtggtggacgtgagccacgaagaccctgaggtcaagttcaactggtacgtggacggcgtggaggtgcataatgccaagacaaagccgcgggaggagcagtacaacagcacgtaccgtgtggtcagcgtcctcaccgtcctgcaccaggactggctgaatggcaaggcgtacgcgtgcgcggtctccaacaaagccctcccagcccccatcgagaaaaccatctccaaagccaaagggcagccccgagaaccacaggtgtacaccctgcccccatcccgggatgagctgaccaagaaccaggtcagcctgacctgcctggtcaaaggcttctatccaagcgacatcgccgtggagtgggagagcaatgggcagccggagaacaactacaagaccacgcctcccgtgctggactccgacggctccttcttcctctacagcaagctcaccgtggacaagagcaggtggcagcaggggaacgtcttctcatgctccgtgatgcatgaggctctgcacaaccactacacgcagaagagcctctccctgtctccgggtcagaggcacaacaattcttccctgaatacaagaactcagaaagcacgtcattctccgaattctgaagttcaattgttagagtctggtggcggtcttgttcagcctggtggttctttacgtctttcttgcgctgcttccggattcactttctctgattaccttatgggttgggttcgccaagctcctggtaaaggtttggagtgggtttctgttatctcttcttctggtggccctactgcttatgctgactccgttaaaggtcgcttcactatctctagagacaactctaagaatactctctacttgcagatgaacagcttaagggctgaggacacggccgtgtattactgtgcgagagtggggcttgactacgggatactgggtgcttttgatatctggggccaagggacaatggtcaccgtctcaagcggtggcggcggttcggggggtggcggaagtggaggtggagggagtcaagacatccagatgacccagtctccagccaccctgtctgtgtctccaggggaaagagccaccctctcctgcagggccagtcagaatattaacacccacttagcctggtaccagcagaaacctggccaggctcccaggctcctcatctttggtgcatccaccagggccactggtatcccagccaggttcagtggcagtgggtctgggacagagttcactctcaccatcagcagcctgcagtctgaagattttacagtttattactgtcagcagtatggtagctcacttacgtggacgttcggccaagggaccaaggtggaaatcaaatgagcggccgcctcgagtctagagggccctattctatagtgtcacctaaatgctagag

SEQ ID NO: 728 - DNA, 2412 bp, Artificial Sequence
  Made in a lab
agaaaaaaactggcttatggcttatcgaaattaatacgactcactatagggagacccaagcttgccgccatggattttcaagtgcagattttcagcttcctgctaatcagtgcttcagtcataatgtcgcgaggattgcccgcccaggtggcatttacaccctacgccccggagcccgggagcacatgccggctcagagaatactatgaccagacagctcagatgtgctgcagcaaatgctcgccgggccaacatgcaaaagtcttctgtaccaagacctcggacaccgtgtgtgactcctgtgaggacagcacatacacccagctctggaactgggttcccgagtgcttgagctgtggctcccgctgtagctctgaccaggtggaaactcaagcctgcactcgggaacagaaccgcatctgcacctgcaggcccggctggtactgcgcgctgagcaagcaggaggggtgccggctgtgcgcgccgctgcgcaagtgccgcccgggcttcggcgtggccagaccaggaactgaaacatcagacgtggtgtgcaagccctgtgccccggggacgttctccaacacgacttcatccacggatatttgcaggccccaccagatctgtaacgtggtggccatccctgggaatgcaagcatggatgcagtctgcacgtccacgtcccccacccggagtatggccccaggggcagtacacttaccccagccagtgtccacacgatcccaacacacgcagccaactccagaacccagcactgctccaagcacctccttcctgctcccaatgggccccagccccccagctgaagggagcactggcgacaccggtgagcccaaatcttctgacaaaactcacacatgcccaccgtgcccagcacctgaagccgcgggtgcaccgtcagtcttcctcttccccccaaaacccaaggacaccctcatgatctcccggacccctgaggtcacatgcgtggtggtggacgtgagccacgaagaccctgaggtcaagttcaactggtacgtggacggcgtggaggtgcataatgccaagacaaagccgcgggaggagcagtacaacagcacgtaccgtgtggtcagcgtcctcaccgtcctgcaccaggactggctgaatggcaaggcgtacgcgtgcgcggtctccaacaaagccctcccagcccccatcgagaaaaccatctccaaagccaaagggcagccccgagaaccacaggtgtacaccctgcccccatcccgggatgagctgaccaagaaccaggtcagcctgacctgcctggtcaaaggcttctatccaagcgacatcgccgtggagtgggagagcaatgggcagccggagaacaactacaagaccacgcctcccgtgctggactccgacggctccttcttcctctacagcaagctcaccgtggacaagagcaggtggcagcaggggaacgtcttctcatgctccgtgatgcatgaggctctgcacaaccactacacgcagaagagcctctccctgtctccgggtcagaggcacaacaattcttccctgaatacaagaactcagaaagcacgtcattctccgaattctgaagttcaattgttagagtctggtggcggtcttgttcagcctggtggttctttacgtctttcttgcgctgcttccggattcactttctctgagtacggtatgtcttgggttcgccaagctcctggtaaaggtttggagtgggtttcttctatccgttcttctggtggctggactaagtatgctgactccgttaaaggtcgcttcactatctctagagacaactctaagaatactctctacttgcagatgaacagcttaagggctgaggacacggccgtgtattactgtgcgaaaggcctaggggccactagtggggaatttgactattggggccagggaaccctggtcaccgtctcaagcggtggcggcggttcggggggtggcggaagtggaggtggagggagtcaagacatccagatgacccagtctccaggcaccctgtctttgtctccaggggaaagagccaccctctcctgcagggccagtcagagtgttagcggcaactacttagcctggtaccagcagaaacttggccaggctcccaggctcctcatctatggtgcatccagcagggccactggcaccccagacaggttcagtggcagtgggtctgggacagaattcactctcacaatcagcagcctgcagcctgaagattttgcaacttattactgtctacagcataatagttatccgctcactttcggcggagggaccaaggtggagatcaaatgagcggccgcctcgagtctagagggccctattctatagtgtcacctaaatgctagagcttcgcgattctgtccctaa

SEQ ID NO: 729 - DNA, 2288 bp, Artificial Sequence
  Made in a lab
aagcttgccgccatggattttcaagtgcagattttcagcttcctgctaatcagtgcttcagtcataatgtcgcgaggattgcccgcccaggtggcatttacaccctacgccccggagcccgggagcacatgccggctcagagaatactatgaccagacagctcagatgtgctgcagcaaatgctcgccgggccaacatgcaaaagtcttctgtaccaagacctcggacaccgtgtgtgactcctgtgaggacagcacatacacccagctctggaactgggttcccgagtgcttgagctgtggctcccgctgtagctctgaccaggtggaaactcaagcctgcactcgggaacagaaccgcatctgcacctgcaggcccggctggtactgcgcgctgagcaagcaggaggggtgccggctgtgcgcgccgctgcgcaagtgccgcccgggcttcggcgtggccagaccaggaactgaaacatcagacgtggtgtgcaagccctgtgccccggggacgttctccaacacgacttcatccacggatatttgcaggccccaccagatctgtaacgtggtggccatccctgggaatgcaagcatggatgcagtctgcacgtccacgtcccccacccggagtatggccccaggggcagtacacttaccccagccagtgtccacacgatcccaacacacgcagccaactccagaacccagcactgctccaagcacctccttcctgctcccaatgggccccagccccccagctgaagggagcactggcgacaccggtgagcccaaatcttctgacaaaactcacacatgcccaccgtgcccagcacctgaagccgcgggtgcaccgtcagtcttcctcttccccccaaaacccaaggacaccctcatgatctcccggacccctgaggtcacatgcgtggtggtggacgtgagccacgaagaccctgaggtcaagttcaactggtacgtggacggcgtggaggtgcataatgccaagacaaagccgcgggaggagcagtacaacagcacgtaccgtgtggtcagcgtcctcaccgtcctgcaccaggactggctgaatggcaaggcgtacgcgtgcgcggtctccaacaaagccctcccagcccccatcgagaaaaccatctccaaagccaaagggcagccccgagaaccacaggtgtacaccctgcccccatcccgggatgagctgaccaagaaccaggtcagcctgacctgcctggtcaaaggcttctatccaagcgacatcgccgtggagtgggagagcaatgggcagccggagaacaactacaagaccacgcctcccgtgctggactccgacggctccttcttcctctacagcaagctcaccgtggacaagagcaggtggcagcaggggaacgtcttctcatgctccgtgatgcatgaggctctgcacaaccactacacgcagaagagcctctccctgtctccgggtcagaggcacaacaattcttccctgaatacaagaactcagaaagcacgtcattctccgaattctgaagttcaattgttagagtctggtggcggtcttgttcagcctggtggttctttacgtctttcttgcgctgcttccggattcactttctctaagtacgatatgtggtgggttcgccaagctcctggtaaaggtttggagtgggtttcttctatctggccttctggtggctggacttcttatgctgactccgttaaaggtcgcttcactatctctagagacaactctaagaatactctctacttgcagatgaacagcttaagggctgaggacacggccgtgtattactgtgcgaaatcccgtggcagcccctggtacggagattttgaccactggggccagggaaccctggtcaccgtctcaagcggtggcggcggttcggggggtggcggaagtggaggtggagggagtcagagcgaattgactcagccaccctcagtgtcagtggccccaggagagacggccacggtcacctgtgggggaatcaacattggaagtaaaagtgtccactggtatcagcagaagccagaccaggcccctgtggtggtcatgtattttgatagcgaccggccctcagggatccctgagcgattctctggctccaactctggagacacggccaccctgaccatcagcagggtcgaagccggggatgaggccgactattactgtcaggtgtgggatagtcgttctgatcaatatgtcttcggatttgggaccaaggtcaccgtcctatgagcggccgc

SEQ ID NO: 730 - DNA, 2279 bp, Artificial Sequence
  Made in a lab
aagcttgccgccatggattttcaagtgcagattttcagcttcctgctaatcagtgcttcagtcataatgtcgcgaggattgcccgcccaggtggcatttacaccctacgccccggagcccgggagcacatgccggctcagagaatactatgaccagacagctcagatgtgctgcagcaaatgctcgccgggccaacatgcaaaagtcttctgtaccaagacctcggacaccgtgtgtgactcctgtgaggacagcacatacacccagctctggaactgggttcccgagtgcttgagctgtggctcccgctgtagctctgaccaggtggaaactcaagcctgcactcgggaacagaaccgcatctgcacctgcaggcccggctggtactgcgcgctgagcaagcaggaggggtgccggctgtgcgcgccgctgcgcaagtgccgcccgggcttcggcgtggccagaccaggaactgaaacatcagacgtggtgtgcaagccctgtgccccggggacgttctccaacacgacttcatccacggatatttgcaggccccaccagatctgtaacgtggtggccatccctgggaatgcaagcatggatgcagtctgcacgtccacgtcccccacccggagtatggccccaggggcagtacacttaccccagccagtgtccacacgatcccaacacacgcagccaactccagaacccagcactgctccaagcacctccttcctgctcccaatgggccccagccccccagctgaagggagcactggcgacaccggtgagcccaaatcttctgacaaaactcacacatgcccaccgtgcccagcacctgaagccgcgggtgcaccgtcagtcttcctcttccccccaaaacccaaggacaccctcatgatctcccggacccctgaggtcacatgcgtggtggtggacgtgagccacgaagaccctgaggtcaagttcaactggtacgtggacggcgtggaggtgcataatgccaagacaaagccgcgggaggagcagtacaacagcacgtaccgtgtggtcagcgtcctcaccgtcctgcaccaggactggctgaatggcaaggcgtacgcgtgcgcggtctccaacaaagccctcccagcccccatcgagaaaaccatctccaaagccaaagggcagccccgagaaccacaggtgtacaccctgcccccatcccgggatgagctgaccaagaaccaggtcagcctgacctgcctggtcaaaggcttctatccaagcgacatcgccgtggagtgggagagcaatgggcagccggagaacaactacaagaccacgcctcccgtgctggactccgacggctccttcttcctctacagcaagctcaccgtggacaagagcaggtggcagcaggggaacgtcttctcatgctccgtgatgcatgaggctctgcacaaccactacacgcagaagagcctctccctgtctccgggtcagaggcacaacaattcttccctgaatacaagaactcagaaagcacgtcattctccgaattctgaagttcaattgttagagtctggtggcggtcttgttcagcctggtggttctttacgtctttcttgcgctgcttccggattcactttctctatgtacactatgcattgggttcgccaagctcctggtaaaggtttggagtgggtttcttggatctctccttctggtggctggactaagtatgctgactccgttaaaggtcgcttcactatctctagagacaactctaagaatactctctacttgcagatgaacagcttaagggctgaggacacggccgtgtattactgtgcggttagtccctggggtggaccctttgactactggggccagggaaccctggtcaccgtctcaagcggtggcggcggttcggggggtggcggaagtggaggtggagggagtcaagacatccagatgacccagtctccttccaccctgtctgcatctgtaggagacagagtcaccatcacttgccgggccagtcagagtattagcagctggttggcctggtatcagcagaaacctgggaaagcccctaagctcctgatctataaggcgtctactttagaaagtggggtcccatcacggttcagcgccggtggatctgggacagaattcactctcaccatcagcagcctgcagcctgatgattttggaacttattactgccaacagtataatagttattcgctcactttcggcggagggaccaaggtggagatcatatgagcggccgc

SEQ ID NO: 731 - DNA, 2409 bp, Artificial Sequence
  Made in a lab
tggacaactgcttactggcttatcgaattaatacgactcactatagggagacccaagcttgccgccatggattttcaagtgcagattttcagcttcctgctaatcagtgcttcagtcataatgtcgcgaggattgcccgcccaggtggcatttacaccctacgccccggagcccgggagcacatgccggctcagagaatactatgaccagacagctcagatgtgctgcagcaaatgctcgccgggccaacatgcaaaagtcttctgtaccaagacctcggacaccgtgtgtgactcctgtgaggacagcacatacacccagctctggaactgggttcccgagtgcttgagctgtggctcccgctgtagctctgaccaggtggaaactcaagcctgcactcgggaacagaaccgcatctgcacctgcaggcccggctggtactgcgcgctgagcaagcaggaggggtgccggctgtgcgcgccgctgcgcaagtgccgcccgggcttcggcgtggccagaccaggaactgaaacatcagacgtggtgtgcaagccctgtgccccggggacgttctccaacacgacttcatccacggatatttgcaggccccaccagatctgtaacgtggtggccatccctgggaatgcaagcatggatgcagtctgcacgtccacgtcccccacccggagtatggccccaggggcagtacacttaccccagccagtgtccacacgatcccaacacacgcagccaactccagaacccagcactgctccaagcacctccttcctgctcccaatgggccccagccccccagctgaagggagcactggcgacaccggtgagcccaaatcttctgacaaaactcacacatgcccaccgtgcccagcacctgaagccgcgggtgcaccgtcagtcttcctcttccccccaaaacccaaggacaccctcatgatctcccggacccctgaggtcacatgcgtggtggtggacgtgagccacgaagaccctgaggtcaagttcaactggtacgtggacggcgtggaggtgcataatgccaagacaaagccgcgggaggagcagtacaacagcacgtaccgtgtggtcagcgtcctcaccgtcctgcaccaggactggctgaatggcaaggcgtacgcgtgcgcggtctccaacaaagccctcccagcccccatcgagaaaaccatctccaaagccaaagggcagccccgagaaccacaggtgtacaccctgcccccatcccgggatgagctgaccaagaaccaggtcagcctgacctgcctggtcaaaggcttctatccaagcgacatcgccgtggagtgggagagcaatgggcagccggagaacaactacaagaccacgcctcccgtgctggactccgacggctccttcttcctctacagcaagctcaccgtggacaagagcaggtggcagcaggggaacgtcttctcatgctccgtgatgcatgaggctctgcacaaccactacacgcagaagagcctctccctgtctccgggtcagaggcacaacaattcttccctgaatacaagaactcagaaagcacgtcattctccgaattctgaagttcaattgttagagtctggtggcggtcttgttcagcctggtggttctttacgtctttcttgcgctgcttccggattcactttctctcagtactttatgatgtgggttcgccaagctcctggtaaaggtttggagtgggtttcttctatctctccttctggtggctatactcagtatgctgactccgttaaaggtcgcttcactatctctagagacaactctaagaatactctctacttgcagatgaacagcttaagggctgaggacacggccgtgtattactgtgcgaaaaccggtgactacacacgctactactcctacggtatggacgtctggggccagggaaccctggtcaccgtctcaagcggtggcggcggttcggggggtggcggaagtggaggtggagggagtcaagacatccagatgacccagtctccatcctccctgtctgcatctgtaggagacagagtcaccatcacttgccgggcaagtcagagcattagcagctatttaaattggtatcagcagaaaccagggaaagcccctaagctcctgatctatgctgcatccagtttgcaaagtggggtcccatcaaggttcagtggcagtggatctgggacagatttcactctcatcatcagcagtctgcaacctgaagattttgcaacttactactgtcaacagagttacagtaccccgctcactttcggcggagggaccaaggtggagatcaaatgagcggccgcctcgagtctagagggccctattctatagtgtcacctaaatgctagagctcgctgaccggcc

SEQ ID NO: 732 - DNA, 2297 bp, Artificial Sequence
  Made in a lab
aagcttgccgccatggattttcaagtgcagattttcagcttcctgctaatcagtgcttcagtcataatgtcgcgaggattgcccgcccaggtggcatttacaccctacgccccggagcccgggagcacatgccggctcagagaatactatgaccagacagctcagatgtgctgcagcaaatgctcgccgggccaacatgcaaaagtcttctgtaccaagacctcggacaccgtgtgtgactcctgtgaggacagcacatacacccagctctggaactgggttcccgagtgcttgagctgtggctcccgctgtagctctgaccaggtggaaactcaagcctgcactcgggaacagaaccgcatctgcacctgcaggcccggctggtactgcgcgctgagcaagcaggaggggtgccggctgtgcgcgccgctgcgcaagtgccgcccgggcttcggcgtggccagaccaggaactgaaacatcagacgtggtgtgcaagccctgtgccccggggacgttctccaacacgacttcatccacggatatttgcaggccccaccagatctgtaacgtggtggccatccctgggaatgcaagcatggatgcagtctgcacgtccacgtcccccacccggagtatggccccaggggcagtacacttaccccagccagtgtccacacgatcccaacacacgcagccaactccagaacccagcactgctccaagcacctccttcctgctcccaatgggccccagccccccagctgaagggagcactggcgacaccggtgagcccaaatcttctgacaaaactcacacatgcccaccgtgcccagcacctgaagccgcgggtgcaccgtcagtcttcctcttccccccaaaacccaaggacaccctcatgatctcccggacccctgaggtcacatgcgtggtggtggacgtgagccacgaagaccctgaggtcaagttcaactggtacgtggacggcgtggaggtgcataatgccaagacaaagccgcgggaggagcagtacaacagcacgtaccgtgtggtcagcgtcctcaccgtcctgcaccaggactggctgaatggcaaggcgtacgcgtgcgcggtctccaacaaagccctcccagcccccatcgagaaaaccatctccaaagccaaagggcagccccgagaaccacaggtgtacaccctgcccccatcccgggatgagctgaccaagaaccaggtcagcctgacctgcctggtcaaaggcttctatccaagcgacatcgccgtggagtgggagagcaatgggcagccggagaacaactacaagaccacgcctcccgtgctggactccgacggctccttcttcctctacagcaagctcaccgtggacaagagcaggtggcagcaggggaacgtcttctcatgctccgtgatgcatgaggctctgcacaaccactacacgcagaagagcctctccctgtctccgggtcagaggcacaacaattcttccctgaatacaagaactcagaaagcacgtcattctccgaattctgaagttcaattgttagagtctggtggcggtcttgttcagcctggtggttctttacgtctttcttgcgctgcttccggattcactttctctggttactctatggcttgggttcgccaagctcctggtaaaggtttggagtgggtttctggtatctactcttctggtggctggacttggtatgctgactccgttaaaggtcgcttcactatctctagagacaactctaagaatactctctacttgcagatgaacagcttaagggctgaggacacagccgtgtattactgtacaagagaccaatctttctcctatgatagtagtcttgatgcttttgatatctggggccaagggacaatggtcaccgtctcaagcggtggcggcggttcggggggtggcggaagtggaggtggagggagtcaagacatccagatgacccagtctccatcctccctgtctgcatctgtaggagacagagtcaccatcacttgccgggcaagtcagagtattaacaactatttaaattggtatcagcagaaaccagggaaagcccctaagctcctgatctatactgcatccactttgcacagtggggtcccatcaaggttcagtggcagtggatctgggacagatttcactctcaccatcagcaatctgcaacctgaagattttgcaacttactactgtcaacagagttacgctaccctccggacgttcggccaagggaccaaggtggagatcaaatgagcggccgc

SEQ ID NO: 733 - DNA, 2303 bp, Artificial Sequence
  Made in a lab
aagcttgccgccatggattttcaagtgcagattttcagcttcctgctaatcagtgcttcagtcataatgtcgcgaggattgcccgcccaggtggcatttacaccctacgccccggagcccgggagcacatgccggctcagagaatactatgaccagacagctcagatgtgctgcagcaaatgctcgccgggccaacatgcaaaagtcttctgtaccaagacctcggacaccgtgtgtgactcctgtgaggacagcacatacacccagctctggaactgggttcccgagtgcttgagctgtggctcccgctgtagctctgaccaggtggaaactcaagcctgcactcgggaacagaaccgcatctgcacctgcaggcccggctggtactgcgcgctgagcaagcaggaggggtgccggctgtgcgcgccgctgcgcaagtgccgcccgggcttcggcgtggccagaccaggaactgaaacatcagacgtggtgtgcaagccctgtgccccggggacgttctccaacacgacttcatccacggatatttgcaggccccaccagatctgtaacgtggtggccatccctgggaatgcaagcatggatgcagtctgcacgtccacgtcccccacccggagtatggccccaggggcagtacacttaccccagccagtgtccacacgatcccaacacacgcagccaactccagaacccagcactgctccaagcacctccttcctgctcccaatgggccccagccccccagctgaagggagcactggcgacaccggtgagcccaaatcttctgacaaaactcacacatgcccaccgtgcccagcacctgaagccgcgggtgcaccgtcagtcttcctcttccccccaaaacccaaggacaccctcatgatctcccggacccctgaggtcacatgcgtggtggtggacgtgagccacgaagaccctgaggtcaagttcaactggtacgtggacggcgtggaggtgcataatgccaagacaaagccgcgggaggagcagtacaacagcacgtaccgtgtggtcagcgtcctcaccgtcctgcaccaggactggctgaatggcaaggcgtacgcgtgcgcggtctccaacaaagccctcccagcccccatcgagaaaaccatctccaaagccaaagggcagccccgagaaccacaggtgtacaccctgcccccatcccgggatgagctgaccaagaaccaggtcagcctgacctgcctggtcaaaggcttctatccaagcgacatcgccgtggagtgggagagcaatgggcagccggagaacaactacaagaccacgcctcccgtgctggactccgacggctccttcttcctctacagcaagctcaccgtggacaagagcaggtggcagcaggggaacgtcttctcatgctccgtgatgcatgaggctctgcacaaccactacacgcagaagagcctctccctgtctccgggtcagaggcacaacaattcttccctgaatacaagaactcagaaagcacgtcattctccgaattctgaagttcaattgttagagtctggtggcggtcttgttcagcctggtggttctttacgtctttcttgcgctgcttccggattcactttctctctttacggtatgcattgggttcgccaagctcctggtaaaggtttggagtgggtttcttctatcgttccttctggtggccttactcgttatgctgactccgttaaaggtcgcttcactatctctagagacaactctaagaatactctctacttgcagatgaacagcttaagggctgaggacacagccacatattactgtgcgagactcgcgtattacgatttttggagtggtcgtgatgcttttgatatctggggccaagggacaatggtcaccgtctcaagcggtggcggcggttcggggggtggcggaagtggaggtggagggagtcagagcgtcttgactcagcctgcctccgtgtctgggtctcctggacagtcgatcaccatctcctgcagtggaagcagcagtgacgttggtcattatgactatgtctcctggtaccaacagcacccaggcaaggcccccaaactcatgatttatgatgtcagtaatcggccctcaggggtttctaatcgcttctctggctccaagtctggcaacacggcctccctgaccatctctgggctccaggctgacgacgaggctgagtattactgcagctcatatacaagcagcggcactcgagtcttcggaactgggaccaaggtcaccgtcctatgagcggccgc

SEQ ID NO: 734 - DNA, 2326 bp, Artificial Sequence
  Made in a lab
aagcttgccgccatggattttcaagtgcagattttcagcttcctgctaatcagtgcttcagtcataatgtcgcgaggattgcccgcccaggtggcatttacaccctacgccccggagcccgggagcacatgccggctcagagaatactatgaccagacagctcagatgtgctgcagcaaatgctcgccgggccaacatgcaaaagtcttctgtaccaagacctcggacaccgtgtgtgactcctgtgaggacagcacatacacccagctctggaactgggttcccgagtgcttgagctgtggctcccgctgtagctctgaccaggtggaaactcaagcctgcactcgggaacagaaccgcatctgcacctgcaggcccggctggtactgcgcgctgagcaagcaggaggggtgccggctgtgcgcgccgctgcgcaagtgccgcccgggcttcggcgtggccagaccaggaactgaaacatcagacgtggtgtgcaagccctgtgccccggggacgttctccaacacgacttcatccacggatatttgcaggccccaccagatctgtaacgtggtggccatccctgggaatgcaagcatggatgcagtctgcacgtccacgtcccccacccggagtatggccccaggggcagtacacttaccccagccagtgtccacacgatcccaacacacgcagccaactccagaacccagcactgctccaagcacctccttcctgctcccaatgggccccagccccccagctgaagggagcactggcgacaccggtgagcccaaatcttctgacaaaactcacacatgcccaccgtgcccagcacctgaagccgcgggtgcaccgtcagtcttcctcttccccccaaaacccaaggacaccctcatgatctcccggacccctgaggtcacatgcgtggtggtggacgtgagccacgaagaccctgaggtcaagttcaactggtacgtggacggcgtggaggtgcataatgccaagacaaagccgcgggaggagcagtacaacagcacgtaccgtgtggtcagcgtcctcaccgtcctgcaccaggactggctgaatggcaaggcgtacgcgtgcgcggtctccaacaaagccctcccagcccccatcgagaaaaccatctccaaagccaaagggcagccccgagaaccacaggtgtacaccctgcccccatcccgggatgagctgaccaagaaccaggtcagcctgacctgcctggtcaaaggcttctatccaagcgacatcgccgtggagtgggagagcaatgggcagccggagaacaactacaagaccacgcctcccgtgctggactccgacggctccttcttcctctacagcaagctcaccgtggacaagagcaggtggcagcaggggaacgtcttctcatgctccgtgatgcatgaggctctgcacaaccactacacgcagaagagcctctccctgtctccgggtcagaggcacaacaattcttccctgaatacaagaactcagaaagcacgtcattctccgaattctgaagttcaattgttagagtctggtggcggtcttgttcagcctggtggttctttacgtctttcttgcgctgcttccggattcactttctctcattacggtatggattgggttcgccaagctcctggtaaaggtttggagtgggtttcttctatctattcttctggtggctatactctttatgctgactccgttaaaggtcgcttcactatctctagagacaactctaagaatactctctacttgcagatgaacagcttaagggctgaggacacagccacatattactgtgccactagaacgtgggcggatgcttttgatgtctggggccaagggaccacggtcaccgtctcaagcggtggcggcggttcggggggtggcggaagtggaggtggagggagtcaagacatccagatgacccagtctccctccaccttgtctgcatctgtgggagacagagtcactttcacttgccgggccagtcagagtgtcaacaactgggtggcctggtatcagcagaaaccagggaaagcccctaagctcctgatctatgctgcatccagtttgcaaagtggggtcccatcaaggttcagtggcagtggatctgggacagatttcactctcaccatcagcagtctgcaacctgaagattttgcaacttactactgtcaacagagttacagtatgccgctcactttcggcggagggaccaaggtggagatcaaatgagcggccgcctcgagtctagagggccctattctatagtgtcacctaaatgctagag

SEQ ID NO: 735 - DNA, 2280 bp, Artificial Sequence
  Made in a lab
aagcttgccgccatggattttcaagtgcagattttcagcttcctgctaatcagtgcttcagtcataatgtcgcgaggagaagttcaattgttagagtctggtggcggtcttgttcagcctggtggttctttacgtctttcttgcgctgcttccggattcactttctctcattacatgatggcttgggttcgccaagctcctggtaaaggtttggagtgggtttcttatatctatccttctggtggctggacttcttatgctgactccgttaaaggtcgcttcactatctctagagacaactctaagaatactctctacttgcagatgaacagcttaagggctgaggacacggccgtgtattactgtgcgagattcgactatactataggttttgacttctggggccagggaaccctggtcaccgtctcaagcggtggcggcggttcggggggtggcggaagtggaggtggagggagtcaagacatccagatgacccagtctccatcctccctgtctgcatctgtaggagacagagtcaccatcacttgccgggcaagtcagagcattagcagctatttaaattggtatcagcagaaaccagggaaagcccctaagctcctgatctatgctgcatccagtttgcaaagtggggtcccatcaaggttcagtggcagtggatctgggacagatttcactctcaccatcagcagtctgcaacctgaagattttgcaacttactactgtcaacagagttacagtacccctcggacgttcggccaagggaccaaggtggaaatcaaaaccggtgagcccaaatcttctgacaaaactcacacatgcccaccgtgcccagcacctgaagccgcgggtgcaccgtcagtcttcctcttccccccaaaacccaaggacaccctcatgatctcccggacccctgaggtcacatgcgtggtggtggacgtgagccacgaagaccctgaggtcaagttcaactggtacgtggacggcgtggaggtgcataatgccaagacaaagccgcgggaggagcagtacaacagcacgtaccgtgtggtcagcgtcctcaccgtcctgcaccaggactggctgaatggcaaggcgtacgcgtgcgcggtctccaacaaagccctcccagcccccatcgagaaaaccatctccaaagccaaagggcagccccgagaaccacaggtgtacaccctgcccccatcccgggatgagctgaccaagaaccaggtcagcctgacctgcctggtcaaaggcttctatccaagcgacatcgccgtggagtgggagagcaatgggcagccggagaacaactacaagaccacgcctcccgtgctggactccgacggctccttcttcctctacagcaagctcaccgtggacaagagcaggtggcagcaggggaacgtcttctcatgctccgtgatgcatgaggctctgcacaaccactacacgcagaagagcctctccctgtctccgggtcagaggcacaacaattcttccctgaatacaagaactcagaaagcacgtcattctccgaattctttgcccgcccaggtggcatttacaccctacgccccggagcccgggagcacatgccggctcagagaatactatgaccagacagctcagatgtgctgcagcaaatgctcgccgggccaacatgcaaaagtcttctgtaccaagacctcggacaccgtgtgtgactcctgtgaggacagcacatacacccagctctggaactgggttcccgagtgcttgagctgtggctcccgctgtagctctgaccaggtggaaactcaagcctgcactcgggaacagaaccgcatctgcacctgcaggcccggctggtactgcgcgctgagcaagcaggaggggtgccggctgtgcgcgccgctgcgcaagtgccgcccgggcttcggcgtggccagaccaggaactgaaacatcagacgtggtgtgcaagccctgtgccccggggacgttctccaacacgacttcatccacggatatttgcaggccccaccagatctgtaacgtggtggccatccctgggaatgcaagcatggatgcagtctgcacgtccacgtcccccacccggagtatggccccaggggcagtacacttaccccagccagtgtccacacgatcccaacacacgcagccaactccagaacccagcactgctccaagcacctccttcctgctcccaatgggccccagccccccagctgaagggagcactggcgactgagcggccgcc

SEQ ID NO: 736 - DNA, 2300 bp, Artificial Sequence
  Made in a lab
aagcttgccgccatggattttcaagtgcagattttcagcttcctgctaatcagtgcttcagtcataatgtcgcgaggagaagttcaattgttagagtctggtggcggtcttgttcagcctggtggttctttacgtctttcctgcgctgcttccggattcactttctcttggtaccttatgcattgggttcgccaagctcctggtaaaggtttggagtgggtttctggtatctggccttctggtggccatactctttatgctgactccgttaaaggtcgcttcactatctctagagacaactctaagaatactctctacttgcagatgaacagcttaagggctgaggacacggccgtgtattactgtgcgagagagccgttactatggttcggggagttatcgtacaactggttcgacccctggggccagggcaccctggtcaccgtctcaagcggtggcggcggttcggggggtggcggaagtggaggtggagggagtcaagacatccagatgacccagtctccatcttccgtgtctgcatctgtaggagacagagtcaccatcacttgtcgggcgagtcagggtattagcagctggttagcctggtatcagcagaaaccagggaaagcccctaagctcctgatctatgctgcatccagtttgcaaagtggggtcccatcaaggttcagcggcagtggatctgggacagatttcactctcaccatcagcagcctgcagcctgaagattttgcaacttactattgtcaacaggctaacagtttccctctcactttcggcggagggaccaaggtggagatcaaaaccggtgagcccaaatcttctgacaaaactcacacatgcccaccgtgcccagcacctgaagccgcgggtgcaccgtcagtcttcctcttccccccaaaacccaaggacaccctcatgatctcccggacccctgaggtcacatgcgtggtggtggacgtgagccacgaagaccctgaggtcaagttcaactggtacgtggacggcgtggaggtgcataatgccaagacaaagccgcgggaggagcagtacaacagcacgtaccgtgtggtcagcgtcctcaccgtcctgcaccaggactggctgaatggcaaggcgtacgcgtgcgcggtctccaacaaagccctcccagcccccatcgagaaaaccatctccaaagccaaagggcagccccgagaaccacaggtgtacaccctgcccccatcccgggatgagctgaccaagaaccaggtcagcctgacctgcctggtcaaaggcttctatccaagcgacatcgccgtggagtgggagagcaatgggcagccggagaacaactacaagaccacgcctcccgtgctggactccgacggctccttcttcctctacagcaagctcaccgtggacaagagcaggtggcagcaggggaacgtcttctcatgctccgtgatgcatgaggctctgcacaaccactacacgcagaagagcctctccctgtctccgggtcagaggcacaacaattcttccctgaatacaagaactcagaaagcacgtcattctccgaattctttgcccgcccaggtggcatttacaccctacgccccggagcccgggagcacatgccggctcagagaatactatgaccagacagctcagatgtgctgcagcaaatgctcgccgggccaacatgcaaaagtcttctgtaccaagacctcggacaccgtgtgtgactcctgtgaggacagcacatacacccagctctggaactgggttcccgagtgcttgagctgtggctcccgctgtagctctgaccaggtggaaactcaagcctgcactcgggaacagaaccgcatctgcacctgcaggcccggctggtactgcgcgctgagcaagcaggaggggtgccggctgtgcgcgccgctgcgcaagtgccgcccgggcttcggcgtggccagaccaggaactgaaacatcagacgtggtgtgcaagccctgtgccccggggacgttctccaacacgacttcatccacggatatttgcaggccccaccagatctgtaacgtggtggccatccctgggaatgcaagcatggatgcagtctgcacgtccacgtcccccacccggagtatggccccaggggcagtacacttaccccagccagtgtccacacgatcccaacacacgcagccaactccagaacccagcactgctccaagcacctccttcctgctcccaatgggccccagccccccagctgaagggagcactggcgactgagcggccgc

SEQ ID NO: 737 - protein, 401 aa, Human
MNNLLCCALVFLDISIKWTTQETFPPKYLHYDEETSHQLLCDKCPPGTYLKQHCTAKWKTVCAPCPDHYYTDSWHTSDECLYCSPVCKELQYVKQECNRTHNRVCECKEGRYLEIEFCLKHRSCPPGFGVVQAGTPERNTVCKRCPDGFFSNETSSKAPCRKHTNCSVFGLLLTQKGNATHDNICSGNSESTQKCGIDVTLCEEAFFRFAVPTKFTPNWLSVLVDNLPGTKVNAESVERIKRQHSSQEQTFQLLKLWKHQNKDQDIVKKIIQDIDLCENSVQRHIGHANLTFEQLRSLMESLPGKKVGAEDIEKTIKACKPSDQILKLLSLWRIKNGDQDTLKGLMHALKHSKTYHFPKTVTQSLKKTIRFLHSFTMYKLYQKLFLEMIGNQVQSVKISCL

SEQ ID NO: 738 - protein, 240 aa, Human
MTILGTTFGMVFSLLQVVSGESGYAQNGDLEDAELDDYSFSCYSQLEVNGSQHSLTCAFEDPDVNITNLEFEICGALVEVKCLNFRKLQEIYFIETKKFLLIGKSNICVKVGEKSLTCKKIDLTTIVKPEAPFDLSVVYREGANDFVVTFNTSHLQKKYVKVLMHDVAYRQEKDENKWTHVNLSSTKLTLLQRKLQPAAMYEIKVRSIPDHYFKGFWSEWSPSYYFRTPEINNSSGEMDP

SEQ ID NO: 739 - protein, 307 aa, Human
MGAARSPPSAVPGPLLGLLLLLLGVLAPGGASLRLLDHRALVCSQPGLNCTVKNSTCLDDSWIHPRNLTPSSPKDLQIQLHFAHTQQGDLFPVAHIEWTLQTDASILYLEGAELSVLQLNTNERLCVRFEFLSKLRHHHRRWRFTFSHFVVDPDQEYEVTVHHLPKPIPDGDPNHQSKNFLVPDCEHARMKVTTPCMSSGSLWDPNITVETLEAHQLRVSFTLWNESTHYQILLTSFPHMENHSCFEHMHHIPAPRPEEFHQRSNVTLTLRNLKGCCRHQVQIQPFFSSCLNDCLRHSATVSCPEMP

SEQ ID NO: 740 - protein, 539 aa, Human
MPVPWFLLSLALGRSPVVLSLERLVGPQDATHCSPVSLEPWGDEERLRVQFLAQQSLSLAPVTAATARTALSGLSGADGRREERGRGKSWVCLSLGGSGNTEPQKKGLSCRLWDSDILCLPGDIVPAPGPVLAPTHLQTELVLRCQKETDCDLCLRVAVHLAVHGHWEEPEDEEKFGGAADSGVEEPRNASLQAQVVLSFQAYPTARCVLLEVQVPAALVQFGQSVGSVVYDCFEAALGSEVRIWSYTQPRYEKELNHTQQLPDCRGLEVWNSIPSCWALPWLNVSADGDNVHLVLNVSEEQHFGLSLYWNQVQGPPKPRWHKNLTGPQIITLNHTDLVPCLCIQVWPLEPDSVRTNICPFREDPRAHQNLWQAARLRLLTLQSWLLDAPCSLPAEAALCWRAPGGDPCQPLVPPLSWENVTVDKVLEFPLLKGHPNLCVQVNSSEKLQLQECLWADSLGPLKDDVLLLETRGPQDNRSLCALEPSGCTSLPSKASTRAARLGEYLLQDLQSGQCLQLWDDDLGALWACPMDKYIHKRW

SEQ ID NO: 741 - protein, 79 aa, Human
MARGSLRRLLRLLVLGLWLALLRSVAGEQAPGTAPCSRGSSWSADLDKCMDCASCRARPHSDFCLGCAAAPPAPFRLLW

SEQ ID NO: 742 - protein, 323 aa, Human
MLLLVTSLLLCELPHPAFLLIPEKSDLRTVAPASSLNVRFDSRTMNLSWDCQENTTFSKCFLTDKKNRVVEPRLSNNECSCTFREICLHEGVTFEVHVNTSQRGFQQKLLYPNSGREGTAAQNFSCFIYNADLMNCTWARGPTAPRDVQYFLYIRNSKRRREIRCPYYIQDSGTHVGCHLDNLSGLTSRNYFLVNGTSREIGIQFFDSLLDTKKIERFNPPSNVTVRCNTTHCLVRWKQPRTYQKLSYLDFQYQLDVHRKNTQPGTENLLINVSGDLENRYNFPSSEPRAKHSVKIRAADVRILNWSSWSEAIEFGSDDGNLG

SEQ ID NO: 743 - protein, 166 aa, Human
MSGLGRSRRGGRSRVDQEERFPQGLWTGVAMRSCPEEQYWDPLLGTCMSCKTICNHQSQRTCAAFCRSLSCRKEQGKFYDHLLRDCISCASICGQHPKQCAYFCENKLRSPVNLPPELRRQRSGEVENNSDNSGRYQGLEHRGSEASPALPGLKLSADQVALVYST

SEQ ID NO: 744 - protein, 23 aa, Artificial Sequence
  Made in lab
  misc_feature (23)..(23): Xaa can be any naturally occurring amino acid
MDFQVQIFSFLLISASVIMSRGX

SEQ ID NO: 745 - protein, 20 aa, Artificial Sequence
  Made in lab
MEAPAQLLFLLLLWLPDTTG

SEQ ID NO: 746 - protein, 1367 aa, Human
MKSGSGGGSPTSLWGLLFLSAALSLWPTSGEICGPGIDIRNDYQQLKRLENCTVIEGYLHILLISKAEDYRSYRFPKLTVITEYLLLFRVAGLESLGDLFPNLTVIRGWKLFYNYALVIFEMTNLKDIGLYNLRNITRGAIRIEKNADLCYLSTVDWSLILDAVSNNYIVGNKPPKECGDLCPGTMEEKPMCEKTTINNEYNYRCWTTNRCQKMCPSTCGKRACTENNECCHPECLGSCSAPDNDTACVACRHYYYAGVCVPACPPNTYRFEGWRCVDRDFCANILSAESSDSEGFVIHDGECMQECPSGFIRNGSQSMYCIPCEGPCPKVCEEEKKTKTIDSVTSAQMLQGCTIFKGNLLINIRRGNNIASELENFMGLIEVVTGYVKIRHSHALVSLSFLKNLRLILGEEQLEGNYSFYVLDNQNLQQLWDWDHRNLTIKAGKMYFAFNPKLCVSEIYRMEEVTGTKGRQSKGDINTRNNGERASCESDVLHFTSTTTSKNRIIITWHRYRPPDYRDLISFTVYYKEAPFKNVTEYDGQDACGSNSWNMVDVDLPPNKDVEPGILLHGLKPWTQYAVYVKAVTLTMVENDHIRGAKSEILYIRTNASVPSIPLDVLSASNSSSQLIVKWNPPSLPNGNLSYYIVRWQRQPQDGYLYRHNYCSKDKIPIRKYADGTIDIEEVTENPKTEVCGGEKGPCCACPKTEAEKQAEKEEAEYRKVFENFLHNSIFVPRPERKRRDVMQVANTTMSSRSRNTTAADTYNITDPEELETEYPFFESRVDNKERTVISNLRPFTLYRIDIHSCNHEAEKLGCSASNFVFARTMPAEGADDIPGPVTWEPRPENSIFLKWPEPENPNGLILMYEIKYGSQVEDQRECVSRQEYRKYGGAKLNRLNPGNYTARIQATSLSGNGSWTDPVFFYVQAKTGYENFIHLIIALPVAVLLIVGGLVIMLYVFHRKRNNSRLGNGVLYASVNPEYFSAADVYVPDEWEVAREKITMSRELGQGSFGMVYEGVAKGVVKDEPETRVAIKTVNEAASMRERIEFLNEASVMKEFNCHHVVRLLGVVSQGQPTLVIMELMTRGDLKSYLRSLRPEMENNPVLAPPSLSKMIQMAGEIADGMAYLNANKFVHRDLAARNCMVAEDFTVKIGDFGMTRDIYETDYYRKGGKGLLPVRWMSPESLKDGVFTTYSDVWSFGVVLWEIATLAEQPYQGLSNEQVLRFVMEGGLLDKPDNCPDMLFELMRMCWQYNPKMRPSFLEIISSIKEEMEPGFREVSFYYSEENKLPEPEELDLEPENMESVPLDPSASSSSLPLPDRHSGHKAENGPGPGVLVLRASFDERQPYAHMNGGRKNERALPLPQSSTC

SEQ ID NO: 747 - protein, 259 aa, Human
MSEVPVARVWLVLLLLTVQVGVTAGAPWQCAPCSAEKLALCPPVSASCSEVTRSAGCGCCPMCALPLGAACGVATARCARGLSCRALPGEQQPLHALTRGQGACVQESDASAPHAAEAGSPESPESTEITEEELLDNFHLMAPSEEDHSILWDAISTYDGSKALHVTNIKKWKEPCRIELYRVVESLAKAQETSGEEISKFYLPNCNKNGFYHSRQCETSMDGEAGLCWCVYPWNGKRIPGSPEIRGDPNCQIYFNVQN

SEQ ID NO: 748 - protein, 328 aa, Human
MLPRVGCPALPLPPPPLLPLLPLLLLLLGASGGGGGARAEVLFRCPPCTPERLAACGPPPVAPPAAVAAVAGGARMPCAELVREPGCGCCSVCARLEGEACGVYTPRCGQGLRCYPHPGSELPLQALVMGEGTCEKRRDAEYGASPEQVADNGDDHSEGGLVENHVDSTMNMLGGGGSAGRKPLKSGMKELAVFREKVTEQHRQMGKGGKHHLGLEEPKKLRPPPARTPCQQELDQVLERISTMRLPDERGPLEHLYSLHIPNCDKHGLYNLKQCKMSLNGQRGECWCVNPNTGKLIQGAPTIRGDPECHLFYNEQQEARGVHTQRMQ

SEQ ID NO: 749 - protein, 297 aa, Human
MQRARPTLWAAALTLLVLLRGPPVARAGASSAGLGPVVRCEPCDARALAQCAPPPAVCAELVREPGCGCCLTCALSEGQPCGIYTERCGSGLRCQPSPDEARPLQALLDGRGLCVNASAVSRLRAYLLPAPPAPGEPPAPGNASESEEDRSAGSVESPSVSSTHRVSDPKFHPLHSKIIIIKKGHAKDSQRYKVDYESQSTDTQNFSSESKRETEYGPCRREMEDTLNHLKFLNVLSPRGVHIPNCDKKGFYKKKQCRPSKGRKRGFCWCVDKYGQPLPGYTTKGKEDVHCYSMQSK

SEQ ID NO: 750 - protein, 291 aa, Human
MQRARPTLWAAALTLLVLLRGPPVARAGASSAGLGPVVRCEPCDARALAQCAPPPAVCAELVREPGCGCCLTCALSEGQPCGIYTERCGSGLRCQPSPDEARPLQALLDGRGLCVNASAVSRLRAYLLPAPPAPGNASESEEDRSAGSVESPSVSSTHRVSDPKFHPLHSKIIIIKKGHAKDSQRYKVDYESQSTDTQNFSSESKRETEYGPCRREMEDTLNHLKFLNVLSPRGVHIPNCDKKGFYKKKQCRPSKGRKRGFCWCVDKYGQPLPGYTTKGKEDVHCYSMQSK

SEQ ID NO: 751 - protein, 258 aa, Human
MLPLCLVAALLLAAGPGPSLGDEAIHCPPCSEEKLARCRPPVGCEELVREPGCGCCATCALGLGMPCGVYTPRCGSGLRCYPPRGVEKPLHTLMHGQGVCMELAEIEAIQESLQPSDKDEGDHPNNSFSPCSAHDRRCLQKHFAKIRDRSTSGGKMKVNGAPREDARPVPQGSCQSELHRALERLAASQSRTHEDLYIIPIPNCDRNGNFHPKQCHPALDGQRGKCWCVDRKTGVKLPGGLEPKGELDCHQLADSFRE

SEQ ID NO: 752 - protein, 272 aa, Human
MVLLTAVLLLLAAYAGPAQSLGSFVHCEPCDEKALSMCPPSPLGCELVKEPGCGCCMTCALAEGQSCGVYTERCAQGLRCLPRQDEEKPLHALLHGRGVCLNEKSYREQVKIERDSREHEEPTTSEMAEETYSPKIFRPKHTRISELKAEAVKKDRRKKLTQSKFVGGAENTAHPRIISAPEMRQESEQGPCRRHMEASLQELKASPRMVPRAVYLPNCDRKGFYKRKQCKPSRGRKRGICWCVDKYGMKLPGMEYVDGDFQCHTFDSSNVE

SEQ ID NO: 753 - protein, 240 aa, Human
MTPHRLLPPLLLLLALLLAASPGGALARCPGCGQGVQAGCPGGCVEEEDGGSPAEGCAEAEGCLRREGQECGVYTPNCAPGLQCHPPKDDEAPLRALLLGRGRCLPARAPAVAEENPKESKPQAGTARPQDVNRRDQQRNPGTSTTPSQPNSAGVQDTEMGPCRRHLDSVLQQLQTEVYRGAQTLYVPNCDHRGFYRKRQCRSSQGQRRGPCWCVDRMGKSLPGSPDGNGSSSCPTGSSG

SEQ ID NO: 754 - protein, 178 aa, Human
MHSSALLCCLVLLTGVRASPGQGTQSENSCTHFPGNLPNMLRDLRDAFSRVKTFFQMKDQLDNLLLKESLLEDFKGYLGCQALSEMIQFYLEEVMPQAENQDPDIKAHVNSLGENLKTLRLRLRRCHRFLPCENKSKAVEQVKNAFNKLQEKGIYKAMSEFDIFINYIEAYMTMKIRN

SEQ ID NO: 755 - protein, 15 aa, Artificial Sequence
  Made in a lab
RASESVHNFGISFMN

SEQ ID NO: 756 - protein, 7 aa, Artificial Sequence
  Made in a lab
TASNQGS

SEQ ID NO: 757 - protein, 9 aa, Artificial Sequence
  Made in a lab
HQGKEVPWT

SEQ ID NO: 758 - protein, 15 aa, Artificial Sequence
  Made in a lab
RASESVGNFGISFVN

SEQ ID NO: 759 - protein, 7 aa, Artificial Sequence
  Made in a lab
AASNQGS

SEQ ID NO: 760 - protein, 9 aa, Artificial Sequence
  Made in a lab
QQSKEVPYT

SEQ ID NO: 761 - protein, 6 aa, Artificial Sequence
  Made in a lab
NTYAMN

SEQ ID NO: 762 - protein, 19 aa, Artificial Sequence
  Made in a lab
RTVTKSNKYATYYADSVSD

SEQ ID NO: 763 - protein, 9 aa, Artificial Sequence
  Made in a lab
EDYYGTLDY

SEQ ID NO: 764 - protein, 5 aa, Artificial Sequence
  Made in a lab
SYWMH

SEQ ID NO: 765 - protein, 17 aa, Artificial Sequence
  Made in a lab
EINPSNGRTNYNERFKS

SEQ ID NO: 766 - protein, 9 aa, Artificial Sequence
  Made in a lab
SDTKATCDY

SEQ ID NO: 767 - protein, 111 aa, Artificial Sequence
  Made in a lab
EIVLTQSPPSLAVSLGQRATISCRASESVHNFGISFMNWFQQKSGQPPKLLIYTASNQGSGVPARFSGRGSGTDFSLIIHPVEEDDTAMYFCHQGKEVPWTFGGGTKLEIK

SEQ ID NO: 768 - protein, 111 aa, Artificial Sequence
  Made in a lab
DIVLTQSPASLAVSLGQRATISCRASESVGNFGISFVNWFQQKPGQPPKLLIYAASNQGSGVPARFSGSGSGTDFSLNIHPMEEDDTAMYFCQQSKEVPYTFGGGTKLEIK

SEQ ID NO: 769 - protein, 111 aa, Artificial Sequence
  Made in a lab
EIVLTQSPATLSLSPGERATLSCRASESVHNFGISFMNWYQQKPGQAPRLLIYTASNQGSGIPARFSGSGSGTDFTLTISSLEPEDFAVYYCHQGKEVPWTFGQGTKVEIK

SEQ ID NO: 770 - protein, 111 aa, Artificial Sequence
  Made in a lab
DIVLTQSPASLAVSPGQRATITCRASESVHNFGISFMNWYQQKPGQPPKLLIYTASNQGSGVPARFSGSGSGTDFTLTINPVEANDTANYYCHQGKEVPWTFGQGTKVEIK

SEQ ID NO: 771 - protein, 111 aa, Artificial Sequence
  Made in a lab
EIVLTQSPATLSLSPGERATLSCRASESVGNFGISFVNWYQQKPGQAPRLLIYAASNQGSGIPARFSGSGSGTDFTLTISSLEPEDFAVYYCQQSKEVPYTFGQGTKLEIK

SEQ ID NO: 772 - protein, 111 aa, Artificial Sequence
  Made in a lab
DIQMTQSPSSLSASVGDRVTITCRASESVGNFGISFVNWYQQKPGKAPKLLIYAASNQGSGVPSRFSGSGSGTDFTLTISSLQPEDFATYYCQQSKEVPYTFGQGTKLEIK

SEQ ID NO: 773 - protein, 120 aa, Artificial Sequence
  Made in a lab
EVQLVESGGGLVQPKGTLRLSCAASGFSFNTYAMNWVRQAPGKSLEWVARTVTKSNKYATYYADSVSDRVTISREDSQSMLYLQMTNLKTEDTAMYYCVREDYYGTLDYWGQGTSVTVSS

SEQ ID NO: 774 - protein, 118 aa, Artificial Sequence
  Made in a lab
QVQLQQPGAELVKPGASVKLSCKASGYIFTSYWMHWVKQRPGQGLEWIGEINPSNGRTNYNERFKSKATLTVDKSSSTAYIQLSSLTSDDSAVYYCSRSDTKATCDYWGQGTTLTVSS

SEQ ID NO: 775 - protein, 120 aa, Artificial Sequence
  Made in a lab
EVQLVESGGGLVQPGGSLRLSCAASGFTFNTYAMNWVRQAPGKGLEWVGRTVTKSNKYATYYADSVSDRFTISRDDSKNSLYLQMNSLKTEDTAVYYCAREDYYGTLDYWGQGTLVTVSS

SEQ ID NO: 776 - protein, 120 aa, Artificial Sequence; identical to SEQ ID NO: 775
  Made in a lab

SEQ ID NO: 777 - protein, 118 aa, Artificial Sequence
  Made in a lab
QVQLVQSGAEVKKPGASVKVSCKASGYIFTSYWMHWVRQAPGQGLEWMGEINPSNGRTNYNERFKSRVTMTRDTSISTAYMELSRLRSDDTAVYYCARSDTKATCDYWGQGTTVTVSS

SEQ ID NO: 778 - protein, 118 aa, Artificial Sequence; identical to SEQ ID NO: 777
  Made in a lab

SEQ ID NO: 779 - DNA, 333 bp, Artificial Sequence
  Made in a lab
gagattgtgctgacccaatctccaccttctttggctgtgtctctggggcagagggccaccatctcctgcagagccagcgaaagtgttcataattttggcattagttttatgaactggtttcaacagaaatcaggacagccacccaaactcctcatctatactgcatccaaccaaggatccggggtccctgccaggtttagtggcagagggtctgggacagacttcagtctcatcatccaccctgtggaggaagatgatactgcaatgtatttctgtcaccaaggtaaggaggttccgtggacgttcggtggaggcaccaagctagaaatcaaa

SEQ ID NO: 780 - DNA, 333 bp, Artificial Sequence
  Made in a lab
gacattgtgctgacccaatctccagcttctttggctgtgtctctagggcagagggccaccatctcctgcagagccagcgaaagtgttggtaattttggcattagttttgtgaactggttccaacagaaaccaggacagccacccaaactcctcatctatgctgcctccaaccaaggatccggggtccctgccaggtttagtggcagtgggtctgggacagacttcagcctcaacatccatcctatggaggaggatgatactgcaatgtatttctgtcagcaaagtaaggaggttccgtacacgttcggaggggggaccaagctggaaataaaa

SEQ ID NO: 781 - DNA, 333 bp, Artificial Sequence
  Made in a lab
gaaattgtgttgacacagtctccagccaccctgtctttgtctccaggggaaagagccaccctctcctgcagagccagcgaaagtgttcataattttggcattagttttatgaactggtaccaacagaaacctggccaggctcccaggctcctcatctatactgcatccaaccaaggatccggcatcccagccaggttcagtggcagtgggtctgggacagacttcactctcaccatcagcagcctagagcctgaagattttgcagtttattactgtcaccaaggtaaggaggttccgtggacgttcggccaagggaccaaggtggaaatcaaa

SEQ ID NO: 782 - DNA, 333 bp, Artificial Sequence
  Made in a lab
gacattgtgctgacccagtctccagcctccttggccgtgtctccaggacagagggccaccatcacctgcagagccagcgaaagtgttcataattttggcattagttttatgaactggtatcagcagaaaccaggacaacctcctaaactcctgatttacactgcatccaaccaaggatccggggtcccagccaggttcagcggcagtgggtctgggaccgatttcaccctcacaattaatcctgtggaagctaatgatactgcaaattattactgtcaccaaggtaaggaggttccgtggacgttcggccaagggaccaaggtggaaatcaaa

SEQ ID NO: 783 - DNA, 333 bp, Artificial Sequence
  Made in a lab
gaaattgtgttgacacagtctccagccaccctgtctttgtctccaggggaaagagccaccctctcctgcagagccagcgaaagtgttggtaattttggcattagttttgtgaactggtaccaacagaaacctggccaggctcccaggctcctcatctatgctgcctccaaccaaggatccggcatcccagccaggttcagtggcagtgggtctgggacagacttcactctcaccatcagcagcctagagcctgaagattttgcagtttattactgtcagcaaagtaaggaggttccgtacacttttggccaggggaccaagctggagatcaag

SEQ ID NO: 784 - DNA, 334 bp, Artificial Sequence
  Made in a lab
gacatccagatgacccagtctccatcctccctgtctgcatctgtaggagacagagtcaccatcacttgcagagccagcgaaagtgttggtaattttggcattagttttgtgaactggtatcagcagaaaccagggaaagcccctaagctcctgatctatgctgcctccaaccaaggatccggggtcccatcaaggttcagtggcagtggatctgggacagatttcactctcaccatcagcagtctgcaacctgaagattttgcaacttactactgtcagcaaagtaaggaggttccgtacacttttggccaggggaccaagctggagatcaagt

SEQ ID NO: 785 - DNA, 360 bp, Artificial Sequence
  Made in a lab
gaggtgcagcttgttgagtctggtggaggattggtacagcctaaagggacattgagactctcatgtgccgcctctggattcagcttcaatacctatgccatgaactgggtccgccaggctccaggaaagagtttggagtgggttgctcgcacagtgactaaaagtaataagtatgcaacatattatgcagattcagtgagtgacagagtcaccatctccagagaggattcacaaagcatgctttatctgcaaatgaccaacttgaaaactgaggacacagccatgtattactgtgtgagagaagattactacggcactctggactactggggtcaaggaacctcagtcaccgtctcctca

SEQ ID NO: 786 - DNA, 354 bp, Artificial Sequence
  Made in a lab
caggtccaactgcagcagcctggggctgaactggtgaagcctggggcttctgtgaagctgtcctgcaaggcttctggctacatcttcaccagctactggatgcactgggtgaagcagaggcctggacaaggccttgagtggattggagagattaatcctagcaacggtcgtactaactacaatgagaggttcaagagcaaggccacactgactgtagacaaatcctccagcacagcctacattcaactcagcagcctgacatctgatgactctgcggtctattactgttcaagatcggatactaaggctacgtgtgactactggggccaaggcaccactctcacagtctcctca

SEQ ID NO: 787 - DNA, 360 bp, Artificial Sequence
  Made in a lab
gaggtgcagctggtggagtctgggggaggcttggtccagcctggagggtccctgagactctcctgtgcagcctctggattcaccttcaatacctatgccatgaactgggtccgccaggctccagggaaggggctggagtgggttggccgcacagtgactaaaagtaataagtatgcaacatattatgcagattcagtgagtgacagattcaccatctcaagagatgattcaaagaactcactgtatctgcaaatgaacagcctgaaaaccgaggacacggccgtgtattactgtgctagagaagattactacggcactctggactactggggccaaggaaccctggtcaccgtctcctca

SEQ ID NO: 788 - DNA, 360 bp, Artificial Sequence; identical to SEQ ID NO: 787
  Made in a lab

SEQ ID NO: 789 - DNA, 354 bp, Artificial Sequence
  Made in a lab
caggtgcagctggtgcagtctggggctgaggtgaagaagcctggggcctcagtgaaggtctcctgcaaggcttctggctacatcttcaccagctactggatgcactgggtgcgacaggcccctggacaagggcttgagtggatgggagagattaatcctagcaacggtcgtactaactacaatgagaggttcaagagcagggtcaccatgaccagggacacgtccatcagcacagcctacatggagctgagcaggctgagatctgacgacacggccgtgtattactgtgcgagatcggatactaaggctacgtgtgactactggggccaagggaccacggtcaccgtctcctct

SEQ ID NO: 790 - DNA, 354 bp, Artificial Sequence; identical to SEQ ID NO: 789
  Made in a lab

SEQ ID NO: 791 - protein, 21 aa, Artificial Sequence
  Made in a lab
QRHNNSSLNTGTQMAGHSPNS

SEQ ID NO: 792 - protein, 21 aa, Artificial Sequence
  Made in a lab
QRHNNSSLNTGTQKARHSPNS

SEQ ID NO: 793 - protein, 21 aa, Artificial Sequence
  Made in a lab
QRHNNSSLNTGTQMARHSPNS

SEQ ID NO: 794 - protein, 21 aa, Artificial Sequence
  Made in a lab
QRHNNSSLNTRTQKAGHSPNS

SEQ ID NO: 795 - protein, 21 aa, Artificial Sequence
  Made in a lab
QRHNNSSLNTRTQMAGHSPNS

SEQ ID NO: 796 - protein, 21 aa, Artificial Sequence
  Made in a lab
QRHNNSSLNTRTQMARHSPNS

SEQ ID NO: 797 - protein, 22 aa, Artificial Sequence
  Made in lab
MDFQVQIFSFLLISASVIMSRG

SEQ ID NO: 798 - protein, 541 aa, Artificial Sequence
  Made in a lab
LPAQVAFTPYAPEPGSTCRLREYYDQTAQMCCSKCSPGQHAKVFCTKTSDTVCDSCEDSTYTQLWNWVPECLSCGSRCSSDQVETQACTREQNRICTCRPGWYCALSKQEGCRLCAPLRKCRPGFGVARPGTETSDVVCKPCAPGTFSNTTSSTDICRPHQICNVVAIPGNASMDAVCTSTSPTRSMAPGAVHLPQPVSTRSQHTQPTPEPSTAPSTSFLLPMGPSPPAEGSTGDTGEPKSSDKTHTCPPCPAPEAAGAPSVFLFPPKPKDTLMISRTPEVTCVVVDVSHEDPEVKFNWYVDGVEVHNAKTKPREEQYNSTYRVVSVLTVLHQDWLNGKAYACAVSNKALPAPIEKTISKAKGQPREPQVYTLPPSRDELTKNQVSLTCLVKGFYPSDIAVEWESNGQPENNYKTTPPVLDSDGSFFLYSKLTVDKSRWQQGNVFSCSVMHEALHNHYTQKSLSLSPGQRHNNSSLNTGTQMAGHSPNSEQAPGTAPCSRGSSWSADLDKCMDCASCRARPHSDFCLGCAAAPPAPFRLLW

SEQ ID NO: 799 - protein, 869 aa, Artificial Sequence [sequence omitted]

SEQ ID NO: 800 - protein, 970 aa, Artificial Sequence [sequence omitted]

SEQ ID NO: 801 - protein, 709 aa, Artificial Sequence [sequence omitted]

SEQ ID NO: 802 - protein, 777 aa, Artificial Sequence
  Made in a lab
LPAQVAFTPYAPEPGSTCRLREYYDQTAQMCCSKCSPGQHAKVFCTKTSDTVCDSCEDSTYTQLWNWVPECLSCGSRCSSDQVETQACTREQNRICTCRPGWYCALSKQEGCRLCAPLRKCRPGFGVARPGTETSDVVCKPCAPGTFSNTTSSTDICRPHQICNVVAIPGNASMDAVCTSTSPTRSMAPGAVHLPQPVSTRSQHTQPTPEPSTAPSTSFLLPMGPSPPAEGSTGDTGEPKSSDKTHTCPPCPAPEAAGAPSVFLFPPKPKDTLMISRTPEVTCVVVDVSHEDPEVKFNWYVDGVEVHNAKTKPREEQYNSTYRVVSVLTVLHQDWLNGKAYACAVSNKALPAPIEKTISKAKGQPREPQVYTLPPSRDELTKNQVSLTCLVKGFYPSDIAVEWESNGQPENNYKTTPPVLDSDGSFFLYSKLTVDKSRWQQGNVFSCSVMHEALHNHYTQKSLSLSPGQRHNNSSLNTGTQMAGHSPNSLRLLDHRALVCSQPGLNCTVKNSTCLDDSWIHPRNLTPSSPKDLQIQLHFAHTQQGDLFPVAHIEWTLQTDASILYLEGAELSVLQLNTNERLCVRFEFLSKLRHHHRRWRFTFSHFVVDPDQEYEVTVHHLPKPIPDGDPNHQSKNFLVPDCEHARMKVTTPCMSSGSLWDPNITVETLEAHQLRVSFTLWNESTHYQILLTSFPHMENHSCFEHMHHIPAPRPEEFHQRSNVTLTLRNLKGCCRHQVQIQPFFSSCLNDCLRHSATVSCPEMPDTPEPIPDYMPLW

SEQ ID NO: 803 - protein, 837 aa, Artificial Sequence [sequence omitted]

SEQ ID NO: 804 - protein, 723 aa, Artificial Sequence [sequence omitted]

SEQ ID NO: 805 - DNA, 1692 bp, Artificial Sequence
  Made in a lab
atggattttcaagtgcagattttcagcttcctgctaatcagtgcttcagtcataatgtcgcgaggattgcccgcccaggtggcatttacaccctacgccccggagcccgggagcacatgccggctcagagaatactatgaccagacagctcagatgtgctgcagcaaatgctcgccgggccaacatgcaaaagtcttctgtaccaagacctcggacaccgtgtgtgactcctgtgaggacagcacatacacccagctctggaactgggttcccgagtgcttgagctgtggctcccgctgtagctctgaccaggtggaaactcaagcctgcactcgggaacagaaccgcatctgcacctgcaggcccggctggtactgcgcgctgagcaagcaggaggggtgccggctgtgcgcgccgctgcgcaagtgccgcccgggcttcggcgtggccagaccaggaactgaaacatcagacgtggtgtgcaagccctgtgccccggggacgttctccaacacgacttcatccacggatatttgcaggccccaccagatctgtaacgtggtggccatccctgggaatgcaagcatggatgcagtctgcacgtccacgtcccccacccggagtatggccccaggggcagtacacttaccccagccagtgtccacacgatcccaacacacgcagccaactccagaacccagcactgctccaagcacctccttcctgctcccaatgggccccagccccccagctgaagggagcactggcgacaccggtgagcccaaatcttctgacaaaactcacacatgcccaccgtgcccagcacctgaagccgcgggtgcaccgtcagtcttcctcttccccccaaaacccaaggacaccctcatgatctcccggacccctgaggtcacatgcgtggtggtggacgtgagccacgaagaccctgaggtcaagttcaactggtacgtggacggcgtggaggtgcataatgccaagacaaagccgcgggaggagcagtacaacagcacgtaccgtgtggtcagcgtcctcaccgtcctgcaccaggactggctgaatggcaaggcgtacgcgtgcgcggtctccaacaaagccctcccagcccccatcgagaaaaccatctccaaagccaaagggcagccccgagaaccacaggtgtacaccctgcccccatcccgggatgagctgaccaagaaccaggtcagcctgacctgcctggtcaaaggcttctatccaagcgacatcgccgtggagtgggagagcaatgggcagccggagaacaactacaagaccacgcctcccgtgctggactccgacggctccttcttcctctacagcaagctcaccgtggacaagagcaggtggcagcaggggaacgtcttctcatgctccgtgatgcatgaggctctgcacaaccactacacgcagaagagcctctccctgtctccgggtcagaggcacaacaattcttccctgaatacaggaactcagatggcaggtcattctccgaattctgagcaagcgccaggcaccgccccctgctcccgcggcagctcctggagcgcggacctggacaagtgcatggactgcgcgtcttgcagggcgcgaccgcacagcgacttctgcctgggctgcgctgcagcacctcctgcccccttccggctgctttggtag

SEQ ID NO: 806 - DNA, 2676 bp, Artificial Sequence
  Made in a lab
atggattttcaagtgcagattttcagcttcctgctaatcagtgcttcagtcataatgtcgcgaggattgcccgcccaggtggcatttacaccctacgccccggagcccgggagcacatgccggctcagagaatactatgaccagacagctcagatgtgctgcagcaaatgctcgccgggccaacatgcaaaagtcttctgtaccaagacctcggacaccgtgtgtgactcctgtgaggacagcacatacacccagctctggaactgggttcccgagtgcttgagctgtggctcccgctgtagctctgaccaggtggaaactcaagcctgcactcgggaacagaaccgcatctgcacctgcaggcccggctggtactgcgcgctgagcaagcaggaggggtgccggctgtgcgcgccgctgcgcaagtgccgcccgggcttcggcgtggccagaccaggaactgaaacatcagacgtggtgtgcaagccctgtgccccggggacgttctccaacacgacttcatccacggatatttgcaggccccaccagatctgtaacgtggtggccatccctgggaatgcaagcatggatgcagtctgcacgtccacgtcccccacccggagtatggccccaggggcagtacacttaccccagccagtgtccacacgatcccaacacacgcagccaactccagaacccagcactgctccaagcacctccttcctgctcccaatgggccccagccccccagctgaagggagcactggcgacaccggtgagcccaaatcttctgacaaaactcacacatgcccaccgtgcccagcacctgaagccgcgggtgcaccgtcagtcttcctcttccccccaaaacccaaggacaccctcatgatctcccggacccctgaggtcacatgcgtggtggtggacgtgagccacgaagaccctgaggtcaagttcaactggtacgtggacggcgtggaggtgcataatgccaagacaaagccgcgggaggagcagtacaacagcacgtaccgtgtggtcagcgtcctcaccgtcctgcaccaggactggctgaatggcaaggcgtacgcgtgcgcggtctccaacaaagccctcccagcccccatcgagaaaaccatctccaaagccaaagggcagccccgagaaccacaggtgtacaccctgcccccatcccgggatgagctgaccaagaaccaggtcagcctgacctgcctggtcaaaggcttctatccaagcgacatcgccgtggagtgggagagcaatgggcagccggagaacaactacaagaccacgcctcccgtgctggactccgacggctccttcttcctctacagcaagctcaccgtggacaagagcaggtggcagcaggggaacgtcttctcatgctccgtgatgcatgaggctctgcacaaccactacacgcagaagagcctctccctgtctccgggtcagaggcacaacaattcttccctgaatacaggaactcagatggcaggtcattctccgaattctgaaacgtttcctccaaagtaccttcattatgacgaagaaacctctcatcagctgttgtgtgacaaatgtcctcctggtacctacctaaaacaacactgtacagcaaagtggaagaccgtgtgcgccccttgccctgaccactactacacagacagctggcacaccagtgacgagtgtctatactgcagccccgtgtgcaaggagctgcagtacgtcaagcaggagtgcaatcgcacccacaaccgcgtgtgcgaatgcaaggaagggcgctaccttgagatagagttctgcttgaaacataggagctgccctcctggatttggagtggtgcaagctggaaccccagagcgaaatacagtttgcaaaagatgtccagatgggttcttctcaaatgagacgtcatctaaagcaccctgtagaaaacacacaaattgcagtgtctttggtctcctgctaactcagaaaggaaatgcaacacacgacaacatatgttccggaaacagtgaatcaactcaaaaatgtggaatagatgttaccctgtgtgaggaggcattcttcaggtttgctgttcctacaaagtttacgcctaactggcttagtgtcttggtagacaatttgcctggcaccaaagtaaacgcagagagtgtagagaggataaaacggcaacacagctcacaagaacagactttccagctgctgaagttatggaaacatcaaaacaaagaccaagatatagtcaagaagatcatccaagatattgacctctgtgaaaacagcgtgcagcggcacattggacatgctaacctcaccttcgagcagcttcgtagcttgatggaaagcttaccgggaaagaaagtgggagcagaagacattgaaaaaacaataaaggcatgcaaacccagtgaccagatcctgaagctgctcagtttgtggcgaataaaaaatggcgaccaagacaccttgaagggcctaatgcacgcactaaagcactcaaagacgtaccactttcccaaaactgtcactcagagtctaaagaagaccatcaggttccttcacagcttcacaatgtacaaattgtatcagaagttatttttagaaatgataggtaaccaggtccaatcagtaaaaataagctgcttataa

SEQ ID NO: 807 - DNA, 2979 bp, Artificial Sequence
  Made in a lab
atggattttcaagtgcagattttcagcttcctgctaatcagtgcttcagtcataatgtcgcgaggattgcccgcccaggtggcatttacaccctacgccccggagcccgggagcacatgccggctcagagaatactatgaccagacagctcagatgtgctgcagcaaatgctcgccgggccaacatgcaaaagtcttctgtaccaagacctcggacaccgtgtgtgactcctgtgaggacagcacatacacccagctctggaactgggttcccgagtgcttgagctgtggctcccgctgtagctctgaccaggtggaaactcaagcctgcactcgggaacagaaccgcatctgcacctgcaggcccggctggtactgcgcgctgagcaagcaggaggggtgccggctgtgcgcgccgctgcgcaagtgccgcccgggcttcggcgtggccagaccaggaactgaaacatcagacgtggtgtgcaagccctgtgccccggggacgttctccaacacgacttcatccacggatatttgcaggccccaccagatctgtaacgtggtggccatccctgggaatgcaagcatggatgcagtctgcacgtccacgtcccccacccggagtatggccccaggggcagtacacttaccccagccagtgtccacacgatcccaacacacgcagccaactccagaacccagcactgctccaagcacctccttcctgctcccaatgggccccagccccccagctgaagggagcactggcgacaccggtgagcccaaatcttctgacaaaactcacacatgcccaccgtgcccagcacctgaagccgcgggtgcaccgtcagtcttcctcttccccccaaaacccaaggacaccctcatgatctcccggacccctgaggtcacatgcgtggtggtggacgtgagccacgaagaccctgaggtcaagttcaactggtacgtggacggcgtggaggtgcataatgccaagacaaagccgcgggaggagcagtacaacagcacgtaccgtgtggtcagcgtcctcaccgtcctgcaccaggactggctgaatggcaaggcgtacgcgtgcgcggtctccaacaaagccctcccagcccccatcgagaaaaccatctccaaagccaaagggcagccccgagaaccacaggtgtacaccctgcccccatcccgggatgagctgaccaagaaccaggtcagcctgacctgcctggtcaaaggcttctatccaagcgacatcgccgtggagtgggagagcaatgggcagccggagaacaactacaagaccacgcctcccgtgctggactccgacggctccttcttcctctacagcaagctcaccgtggacaagagcaggtggcagcaggggaacgtcttctcatgctccgtgatgcatgaggctctgcacaaccactacacgcagaagagcctctccctgtctccgggtcagaggcacaacaattcttccctgaatacaggaactcagatggcaggtcattctccgaattctgaaatctgcgggccaggcatcgacatccgcaacgactatcagcagctgaagcgcctggagaactgcacggtgatcgagggctacctccacatcctgctcatctccaaggccgaggactaccgcagctaccgcttccccaagctcacggtcattaccgagtacttgctgctgttccgagtggctggcctcgagagcctcggagacctcttccccaacctcacggtcatccgcggctggaaactcttctacaactacgccctggtcatcttcgagatgaccaatctcaaggatattgggctttacaacctgaggaacattactcggggggccatcaggattgagaaaaatgctgacctctgttacctctccactgtggactggtccctgatcctggatgcggtgtccaataactacattgtggggaataagcccccaaaggaatgtggggacctgtgtccagggaccatggaggagaagccgatgtgtgagaagaccaccatcaacaatgagtacaactaccgctgctggaccacaaaccgctgccagaaaatgtgcccaagcacgtgtgggaagcgggcgtgcaccgagaacaatgagtgctgccaccccgagtgcctgggcagctgcagcgcgcctgacaacgacacggcctgtgtagcttgccgccactactactatgccggtgtctgtgtgcctgcctgcccgcccaacacctacaggtttgagggctggcgctgtgtggaccgtgacttctgcgccaacatcctcagcgccgagagcagcgactccgaggggtttgtgatccacgacggcgagtgcatgcaggagtgcccctcgggcttcatccgcaacggcagccagagcatgtactgcatcccttgtgaaggtccttgcccgaaggtctgtgaggaagaaaagaaaacaaagaccattgattctgttacttctgctcagatgctccaaggatgcaccatcttcaagggcaatttgctcattaacatccgacgggggaataacattgcttcagagctggagaacttcatggggctcatcgaggtggtgacgggctacgtgaagatccgccattctcatgccttggtctccttgtccttcctaaaaaaccttcgcctcatcctaggagaggagcagctagaagggaattactccttctacgtcctcgacaaccagaacttgcagcaactgtgggactgggaccaccgcaacctgaccatcaaagcagggaaaatgtactttgctttcaatcccaaattatgtgtttccgaaatttaccgcatggaggaagtgacggggactaaagggcgccaaagcaaaggggacataaacaccaggaacaacggggagagagcctcctgtgaaagtgacgtcctgcatttcacctccaccaccacgtcgaagaatcgcatcatcataacctggcacgcctag

SEQ ID NO: 808 - DNA, 2196 bp, Artificial Sequence
  Made in a lab
atggattttcaagtgcagattttcagcttcctgctaatcagtgcttcagtcataatgtcgcgaggattgcccgcccaggtggcatttacaccctacgccccggagcccgggagcacatgccggctcagagaatactatgaccagacagctcagatgtgctgcagcaaatgctcgccgggccaacatgcaaaagtcttctgtaccaagacctcggacaccgtgtgtgactcctgtgaggacagcacatacacccagctctggaactgggttcccgagtgcttgagctgtggctcccgctgtagctctgaccaggtggaaactcaagcctgcactcgggaacagaaccgcatctgcacctgcaggcccggctggtactgcgcgctgagcaagcaggaggggtgccggctgtgcgcgccgctgcgcaagtgccgcccgggcttcggcgtggccagaccaggaactgaaacatcagacgtggtgtgcaagccctgtgccccggggacgttctccaacacgacttcatccacggatatttgcaggccccaccagatctgtaacgtggtggccatccctgggaatgcaagcatggatgcagtctgcacgtccacgtcccccacccggagtatggccccaggggcagtacacttaccccagccagtgtccacacgatcccaacacacgcagccaactccagaacccagcactgctccaagcacctccttcctgctcccaatgggccccagccccccagctgaagggagcactggcgacaccggtgagcccaaatcttctgacaaaactcacacatgcccaccgtgcccagcacctgaagccgcgggtgcaccgtcagtcttcctcttccccccaaaacccaaggacaccctcatgatctcccggacccctgaggtcacatgcgtggtggtggacgtgagccacgaagaccctgaggtcaagttcaactggtacgtggacggcgtggaggtgcataatgccaagacaaagccgcgggaggagcagtacaacagcacgtaccgtgtggtcagcgtcctcaccgtcctgcaccaggactggctgaatggcaaggcgtacgcgtgcgcggtctccaacaaagccctcccagcccccatcgagaaaaccatctccaaagccaaagggcagccccgagaaccacaggtgtacaccctgcccccatcccgggatgagctgaccaagaaccaggtcagcctgacctgcctggtcaaaggcttctatccaagcgacatcgccgtggagtgggagagcaatgggcagccggagaacaactacaagaccacgcctcccgtgctggactccgacggctccttcttcctctacagcaagctcaccgtggacaagagcaggtggcagcaggggaacgtcttctcatgctccgtgatgcatgaggctctgcacaaccactacacgcagaagagcctctccctgtctccgggtcagaggcacaacaattcttccctgaatacaggaactcagatggcaggtcattctccgaattctgaaagtggctatgctcaaaatggagacttggaagatgcagaactggatgactactcattctcatgctatagccagttggaagtgaatggatcgcagcactcactgacctgtgcttttgaggacccagatgtcaacatcaccaatctggaatttgaaatatgtggggccctcgtggaggtaaagtgcctgaatttcaggaaactacaagagatatatttcatcgagacaaagaaattcttactgattggaaagagcaatatatgtgtgaaggttggagaaaagagtctaacctgcaaaaaaatagacctaaccactatagttaaacctgaggctccttttgacctgagtgtcgtctatcgggaaggagccaatgactttgtggtgacatttaatacatcacacttgcaaaagaagtatgtaaaagttttaatgcacgatgtagcttaccgccaggaaaaggatgaaaacaaatggacgcatgtgaatttatccagcacaaagctgacactcctgcagagaaagctccaaccggcagcaatgtatgagattaaagttcgatccatccctgatcactattttaaaggcttctggagtgaatggagtccaagttattacttcagaactccagagatcaataatagctcaggggagatggatccttag

SEQ ID NO: 809 - DNA, 2400 bp, Artificial Sequence
  Made in a lab
atggattttcaagtgcagattttcagcttcctgctaatcagtgcttcagtcataatgtcgcgaggattgcccgcccaggtggcatttacaccctacgccccggagcccgggagcacatgccggctcagagaatactatgaccagacagctcagatgtgctgcagcaaatgctcgccgggccaacatgcaaaagtcttctgtaccaagacctcggacaccgtgtgtgactcctgtgaggacagcacatacacccagctctggaactgggttcccgagtgcttgagctgtggctcccgctgtagctctgaccaggtggaaactcaagcctgcactcgggaacagaaccgcatctgcacctgcaggcccggctggtactgcgcgctgagcaagcaggaggggtgccggctgtgcgcgccgctgcgcaagtgccgcccgggcttcggcgtggccagaccaggaactgaaacatcagacgtggtgtgcaagccctgtgccccggggacgttctccaacacgacttcatccacggatatttgcaggccccaccagatctgtaacgtggtggccatccctgggaatgcaagcatggatgcagtctgcacgtccacgtcccccacccggagtatggccccaggggcagtacacttaccccagccagtgtccacacgatcccaacacacgcagccaactccagaacccagcactgctccaagcacctccttcctgctcccaatgggccccagccccccagctgaagggagcactggcgacaccggtgagcccaaatcttctgacaaaactcacacatgcccaccgtgcccagcacctgaagccgcgggtgcaccgtcagtcttcctcttccccccaaaacccaaggacaccctcatgatctcccggacccctgaggtcacatgcgtggtggtggacgtgagccacgaagaccctgaggtcaagttcaactggtacgtggacggcgtggaggtgcataatgccaagacaaagccgcgggaggagcagtacaacagcacgtaccgtgtggtcagcgtcctcaccgtcctgcaccaggactggctgaatggcaaggcgtacgcgtgcgcggtctccaacaaagccctcccagcccccatcgagaaaaccatctccaaagccaaagggcagccccgagaaccacaggtgtacaccctgcccccatcccgggatgagctgaccaagaaccaggtcagcctgacctgcctggtcaaaggcttctatccaagcgacatcgccgtggagtgggagagcaatgggcagccggagaacaactacaagaccacgcctcccgtgctggactccgacggctccttcttcctctacagcaagctcaccgtggacaagagcaggtggcagcaggggaacgtcttctcatgctccgtgatgcatgaggctctgcacaaccactacacgcagaagagcctctccctgtctccgggtcagaggcacaacaattcttccctgaatacaggaactcagatggcaggtcattctccgaattctctgcgactcctggaccaccgggcgctggtctgctcccagccggggctaaactgcacggtcaagaatagtacctgcctggatgacagctggattcaccctcgaaacctgaccccctcctccccaaaggacctgcagatccagctgcactttgcccacacccaacaaggagacctgttccccgtggctcacatcgaatggacactgcagacagacgccagcatcctgtacctcgagggtgcagagttatctgtcctgcagctgaacaccaatgaacgtttgtgcgtcaggtttgagtttctgtccaaactgaggcatcaccacaggcggtggcgttttaccttcagccactttgtggttgaccctgaccaggaatatgaggtgaccgttcaccacctgcccaagcccatccctgatggggacccaaaccaccagtccaagaatttccttgtgcctgactgtgagcacgccaggatgaaggtaaccacgccatgcatgagctcaggcagcctgtgggaccccaacatcaccgtggagaccctggaggcccaccagctgcgtgtgagcttcaccctgtggaacgaatctacccattaccagatcctgctgaccagttttccgcacatggagaaccacagttgctttgagcacatgcaccacatacctgcgcccagaccagaagagttccaccagcgatccaacgtcacactcactctacgcaaccttaaagggtgctgtcgccaccaagtgcagatccagcccttcttcagcagctgcctcaatgactgcctcagacactccgcgactgtttcctgcccagaaatgccagacactccagaaccaattccggactacatgcccctgtggtag

SEQ ID NO: 810 - DNA, 2577 bp, Artificial Sequence
  Made in a lab
atggattttcaagtgcagattttcagcttcctgctaatcagtgcttcagtcataatgtcgcgaggattgcccgcccaggtggcatttacaccctacgccccggagcccgggagcacatgccggctcagagaatactatgaccagacagctcagatgtgctgcagcaaatgctcgccgggccaacatgcaaaagtcttctgtaccaagacctcggacaccgtgtgtgactcctgtgaggacagcacatacacccagctctggaactgggttcccgagtgcttgagctgtggctcccgctgtagctctgaccaggtggaaactcaagcctgcactcgggaacagaaccgcatctgcacctgcaggcccggctggtactgcgcgctgagcaagcaggaggggtgccggctgtgcgcgccgctgcgcaagtgccgcccgggcttcggcgtggccagaccaggaactgaaacatcagacgtggtgtgcaagccctgtgccccggggacgttctccaacacgacttcatccacggatatttgcaggccccaccagatctgtaacgtggtggccatccctgggaatgcaagcatggatgcagtctgcacgtccacgtcccccacccggagtatggccccaggggcagtacacttaccccagccagtgtccacacgatcccaacacacgcagccaactccagaacccagcactgctccaagcacctccttcctgctcccaatgggccccagccccccagctgaagggagcactggcgacaccggtgagcccaaatcttctgacaaaactcacacatgcccaccgtgcccagcacctgaagccgcgggtgcaccgtcagtcttcctcttccccccaaaacccaaggacaccctcatgatctcccggacccctgaggtcacatgcgtggtggtggacgtgagccacgaagaccctgaggtcaagttcaactggtacgtggacggcgtggaggtgcataatgccaagacaaagccgcgggaggagcagtacaacagcacgtaccgtgtggtcagcgtcctcaccgtcctgcaccaggactggctgaatggcaaggcgtacgcgtgcgcggtctccaacaaagccctcccagcccccatcgagaaaaccatctccaaagccaaagggcagccccgagaaccacaggtgtacaccctgcccccatcccgggatgagctgaccaagaaccaggtcagcctgacctgcctggtcaaaggcttctatccaagcgacatcgccgtggagtgggagagcaatgggcagccggagaacaactacaagaccacgcctcccgtgctggactccgacggctccttcttcctctacagcaagctcaccgtggacaagagcaggtggcagcaggggaacgtcttctcatgctccgtgatgcatgaggctctgcacaaccactacacgcagaagagcctctccctgtctccgggtcagaggcacaacaattcttccctgaatacaggaactcagatggcaggtcattctccgaattctctggagaggcttgtggggcctcaggacgctacccactgctctccgggcctctcctgccgcctctgggacagtgacatactctgcctgcctggggacatcgtgcctgctccgggccccgtgctggcgcctacgcacctgcagacagagctggtgctgaggtgccagaaggagaccgactgtgacctctgtctgcgtgtggctgtccacttggccgtgcatgggcactgggaagagcctgaagatgaggaaaagtttggaggagcagctgactcaggggtggaggagcctaggaatgcctctctccaggcccaagtcgtgctctccttccaggcctaccctactgcccgctgcgtcctgctggaggtgcaagtgcctgctgcccttgtgcagtttggtcagtctgtgggctctgtggtatatgactgcttcgaggctgccctagggagtgaggtacgaatctggtcctatactcagcccaggtacgagaaggaactcaaccacacacagcagctgcctgccctgccctggctcaacgtgtcagcagatggtgacaacgtgcatctggttctgaatgtctctgaggagcagcacttcggcctctccctgtactggaatcaggtccagggccccccaaaaccccggtggcacaaaaacctgactggaccgcagatcattaccttgaaccacacagacctggttccctgcctctgtattcaggtgtggcctctggaacctgactccgttaggacgaacatctgccccttcagggaggacccccgcgcacaccagaacctctggcaagccgcccgactgcgactgctgaccctgcagagctggctgctggacgcaccgtgctcgctgcccgcagaagcggcactgtgctggcgggctccgggtggggacccctgccagccactggtcccaccgctttcctgggagaacgtcactgtggacaaggttctcgagttcccattgctgaaaggccaccctaacctctgtgttcaggtgaacagctcggagaagctgcagctgcaggagtgcttg

SEQ ID NO: 811 - DNA, 2235 bp, Artificial Sequence
  Made in a lab
atggattttcaagtgcagattttcagcttcctgctaatcagtgcttcagtcataatgtcgcgaggattgcccgcccaggtggcatttacaccctacgccccggagcccgggagcacatgccggctcagagaatactatgaccagacagctcagatgtgctgcagcaaatgctcgccgggccaacatgcaaaagtcttctgtaccaagacctcggacaccgtgtgtgactcctgtgaggacagcacatacacccagctctggaactgggttcccgagtgcttgagctgtggctcccgctgtagctctgaccaggtggaaactcaagcctgcactcgggaacagaaccgcatctgcacctgcaggcccggctggtactgcgcgctgagcaagcaggaggggtgccggctgtgcgcgccgctgcgcaagtgccgcccgggcttcggcgtggccagaccaggaactgaaacatcagacgtggtgtgcaagccctgtgccccggggacgttctccaacacgacttcatccacggatatttgcaggccccaccagatctgtaacgtggtggccatccctgggaatgcaagcatggatgcagtctgcacgtccacgtcccccacccggagtatggccccaggggcagtacacttaccccagccagtgtccacacgatcccaacacacgcagccaactccagaacccagcactgctccaagcacctccttcctgctcccaatgggccccagccccccagctgaagggagcactggcgacaccggtgagcccaaatcttctgacaaaactcacacatgcccaccgtgcccagcacctgaagccgcgggtgcaccgtcagtcttcctcttccccccaaaacccaaggacaccctcatgatctcccggacccctgaggtcacatgcgtggtggtggacgtgagccacgaagaccctgaggtcaagttcaactggtacgtggacggcgtggaggtgcataatgccaagacaaagccgcgggaggagcagtacaacagcacgtaccgtgtggtcagcgtcctcaccgtcctgcaccaggactggctgaatggcaaggcgtacgcgtgcgcggtctccaacaaagccctcccagcccccatcgagaaaaccatctccaaagccaaagggcagccccgagaaccacaggtgtacaccctgcccccatcccgggatgagctgaccaagaaccaggtcagcctgacctgcctggtcaaaggcttctatccaagcgacatcgccgtggagtgggagagcaatgggcagccggagaacaactacaagaccacgcctcccgtgctggactccgacggctccttcttcctctacagcaagctcaccgtggacaagagcaggtggcagcaggggaacgtcttctcatgctccgtgatgcatgaggctctgcacaaccactacacgcagaagagcctctccctgtctccgggtcagaggcacaacaattcttccctgaatacaggaactcagatggcaggtcattctccgaattctgctccgtggcagtgcgcgccctgctccgccgagaagctcgcgctctgcccgccggtgtccgcctcgtgctcggaggtcacccggtccgccggctgcggctgttgcccgatgtgcgccctgcctctgggcgccgcgtgcggcgtggcgactgcacgctgcgcccggggactcagttgccgcgcgctgccgggggagcagcaacctctgcacgccctcacccgcggccaaggcgcctgcgtgcaggagtctgacgcctccgctccccatgctgcagaggcagggagccctgaaagcccagagagcacggagataactgaggaggagctcctggataatttccatctgatggccccttctgaagaggatcattccatcctttgggacgccatcagtacctatgatggctcgaaggctctccatgtcaccaacatcaaaaaatggaaggagccctgccgaatagaactctacagagtcgtagagagtttagccaaggcacaggagacatcaggagaagaaatttccaaattttacctgccaaactgcaacaagaatggattttatcacagcagacagtgtgagacatccatggatggagaggcgggactctgctggtgcgtctacccttggaatgggaagaggatccctgggtctccagagatcaggggagaccccaactgccagatatattttaatgtacaaaac

SEQ ID NO: 812 - protein, 1156 aa, Artificial Sequence [sequence omitted]

SEQ ID NO: 813 - protein, 961 aa, Artificial Sequence
  Made in a lab
MEAPAQLLFLLLLWLPDTTGEICGPGIDIRNDYQQLKRLENCTVIEGYLHILLISKAEDYRSYRFPKLTVITEYLLLFRVAGLESLGDLFPNLTVIRGWKLFYNYALVIFEMTNLKDIGLYNLRNITRGAIRIEKNADLCYLSTVDWSLILDAVSNNYIVGNKPPKECGDLCPGTMEEKPMCEKTTINNEYNYRCWTTNRCQKMCPSTCGKRACTENNECCHPECLGSCSAPDNDTACVACRHYYYAGVCVPACPPNTYRFEGWRCVDRDFCANILSAESSDSEGFVIHDGECMQECPSGFIRNGSQSMYCIPCEGPCPKVCEEEKKTKTIDSVTSAQMLQGCTIFKGNLLINIRRGNNIASELENFMGLIEVVTGYVKIRHSHALVSLSFLKNLRLILGEEQLEGNYSFYVLDNQNLQQLWDWDHRNLTIKAGKMYFAFNPKLCVSEIYRMEEVTGTKGRQSKGDINTRNNGERASCESDVLHFTSTTTSKNRIIITWHRYRPPDYRDLISFTVYYKEAPFKNVTEYDGQDACGSNSWNMVDVDLPPNKDVEPGILLHGLKPWTQYAVYVKAVTLTMVENDHIRGAKSEILYIRTNASVPSIPLDVLSASNSSSQLIVKWNPPSLPNGNLSYYIVRWQRQPQDGYLYRHNYCSKDKIPIRKYADGTIDIEEVTENPKTEVCGGEKGPCCACPKTEAEKQAEKEEAEYRKVFENFLHNSIFVPRPESDQEPKSCDKTHTSPPCSAPELLGGPSVFLFPPKPKDTLMISRTPEVTCVVVDVSHEDPEVKFNWYVDGVEVHNAKTKPREEQYNSTYRVVSVLTVLHQDWLNGKEYKCKVSNKALPAPIEKTISKAKGQPREPQVYTLPPSRDELTKNQVSLTCLVKGFYPSDIAVEWESNGQPENNYKTTPPVLDSDGSFFLYSKLTVDKSRWQQGNVFSCSVMHEALHNHYTQKSLSLSPGK

SEQ ID NO: 814 - DNA, 3468 bp, Artificial Sequence
  Made in a lab
atggaagcaccagcgcagcttctcttcctcctgctactctggctcccagataccaccggtgaaatctgcgggccaggcatcgacatccgcaacgactatcagcagctgaagcgcctggagaactgcacggtgatcgagggctacctccacatcctgctcatctccaaggccgaggactaccgcagctaccgcttccccaagctcacggtcattaccgagtacttgctgctgttccgagtggctggcctcgagagcctcggagacctcttccccaacctcacggtcatccgcggctggaaactcttctacaactacgccctggtcatcttcgagatgaccaatctcaaggatattgggctttacaacctgaggaacattactcggggggccatcaggattgagaaaaatgctgacctctgttacctctccactgtggactggtccctgatcctggatgcggtgtccaataactacattgtggggaataagcccccaaaggaatgtggggacctgtgtccagggaccatggaggagaagccgatgtgtgagaagaccaccatcaacaatgagtacaactaccgctgctggaccacaaaccgctgccagaaaatgtgcccaagcacgtgtgggaagcgggcgtgcaccgagaacaatgagtgctgccaccccgagtgcctgggcagctgcagcgcgcctgacaacgacacggcctgtgtagcttgccgccactactactatgccggtgtctgtgtgcctgcctgcccgcccaacacctacaggtttgagggctggcgctgtgtggaccgtgacttctgcgccaacatcctcagcgccgagagcagcgactccgaggggtttgtgatccacgacggcgagtgcatgcaggagtgcccctcgggcttcatccgcaacggcagccagagcatgtactgcatcccttgtgaaggtccttgcccgaaggtctgtgaggaagaaaagaaaacaaagaccattgattctgttacttctgctcagatgctccaaggatgcaccatcttcaagggcaatttgctcattaacatccgacgggggaataacattgcttcagagctggagaacttcatggggctcatcgaggtggtgacgggctacgtgaagatccgccattctcatgccttggtctccttgtccttcctaaaaaaccttcgcctcatcctaggagaggagcagctagaagggaattactccttctacgtcctcgacaaccagaacttgcagcaactgtgggactgggaccaccgcaacctgaccatcaaagcagggaaaatgtactttgctttcaatcccaaattatgtgtttccgaaatttaccgcatggaggaagtgacggggactaaagggcgccaaagcaaaggggacataaacaccaggaacaacggggagagagcctcctgtgaaagtgacgtcctgcatttcacctccaccaccacgtcgaagaatcgcatcatcataacctggcaccggtaccggccccctgactacagggatctcatcagcttcaccgtttactacaaggaagcaccctttaagaatgtcacagagtatgatgggcaggatgcctgcggctccaacagctggaacatggtggacgtggacctcccgcccaacaaggacgtggagcccggcatcttactacatgggctgaagccctggactcagtacgccgtttacgtcaaggctgtgaccctcaccatggtggagaacgaccatatccgtggggccaagagtgagatcttgtacattcgcaccaatgcttcagttccttccattcccttggacgttctttcagcatcgaactcctcttctcagttaatcgtgaagtggaaccctccctctctgcccaacggcaacctgagttactacattgtgcgctggcagcggcagcctcaggacggctacctttaccggcacaattactgctccaaagacaaaatccccatcaggaagtatgccgacggcaccatcgacattgaggaggtcacagagaaccccaagactgaggtgtgtggtggggagaaagggccttgctgcgcctgccccaaaactgaagccgagaagcaggccgagaaggaggaggctgaataccgcaaagtctttgagaatttcctgcacaactccatcttcgtgcccagacctgaaaggaagcggagagatgtcatgcaagtggccaacaccaccatgtccagccgaagcaggaacaccacggccgcagacacctacaacatcaccgacccggaagagctggagacagagtaccctttctttgagagcagagtggataacaaggagagaactgtcatttctaaccttcggcctttcacattgtaccgcatcgatatccacagctgcaaccacgaggctgagaagctgggctgcagcgcctccaacttcgtctttgcaaggactatgcccgcagaaggagcagatgacattcctgggccagtgacctgggagccaaggcctgaaaactccatctttttaaagtggccggaacctgagaatcccaatggattgattctaatgtatgaaataaaatacggatcacaagttgaggatcagcgagaatgtgtgtccagacaggaatacaggaagtatggaggggccaagctaaaccggctaaacccggggaactacacagcccggattcaggccacatctctctctgggaatgggtcgtggacagatcctgtgttcttctatgtccaggccaaaacaggatatgaaaactcgagcgagcccaaatcttctgacaaaactcacacatctccaccgtcctcagcacctgaactcctgggtggaccgtcagtcttcctcttccccccaaaacccaaggacaccctcatgatctcccggacccctgaggtcacatgcgtggtggtggacgtgagccacgaagaccctgaggtcaagttcaactggtacgtggacggcgtggaggtgcataatgccaagacaaagccgcgggaggagcagtacaacagcacgtaccgtgtggtcagcgtcctcaccgtcctgcaccaggactggctgaatggcaaggagtacaagtgcaaggtctccaacaaagccctcccagcccccatcgagaaaaccatctccaaagccaaagggcagccccgagaaccacaggtgtacaccctgcccccatcccgggatgagctgaccaagaaccaggtcagcctgacctgcctggtcaaaggcttctatccaagcgacatcgccgtggagtgggagagcaatgggcagccggagaacaactacaagaccacgcctcccgtgctggactccgacggctccttcttcctctacagcaagctcaccgtggacaagagcaggtggcagcaggggaacgtcttctcatgctccgtgatgcatgaggctctgcacaaccactacacgcagaagagcctctccctgtctccgggtaaa

SEQ ID NO: 815 - DNA, 2883 bp, Artificial Sequence
  Made in a lab
atggaagcaccagcgcagcttctcttcctcctgctactctggctcccagataccaccggtgaaatctgcgggccaggcatcgacatccgcaacgactatcagcagctgaagcgcctggagaactgcacggtgatcgagggctacctccacatcctgctcatctccaaggccgaggactaccgcagctaccgcttccccaagctcacggtcattaccgagtacttgctgctgttccgagtggctggcctcgagagcctcggagacctcttccccaacctcacggtcatccgcggctggaaactcttctacaactacgccctggtcatcttcgagatgaccaatctcaaggatattgggctttacaacctgaggaacattactcggggggccatcaggattgagaaaaatgctgacctctgttacctctccactgtggactggtccctgatcctggatgcggtgtccaataactacattgtggggaataagcccccaaaggaatgtggggacctgtgtccagggaccatggaggagaagccgatgtgtgagaagaccaccatcaacaatgagtacaactaccgctgctggaccacaaaccgctgccagaaaatgtgcccaagcacgtgtgggaagcgggcgtgcaccgagaacaatgagtgctgccaccccgagtgcctgggcagctgcagcgcgcctgacaacgacacggcctgtgtagcttgccgccactactactatgccggtgtctgtgtgcctgcctgcccgcccaacacctacaggtttgagggctggcgctgtgtggaccgtgacttctgcgccaacatcctcagcgccgagagcagcgactccgaggggtttgtgatccacgacggcgagtgcatgcaggagtgcccctcgggcttcatccgcaacggcagccagagcatgtactgcatcccttgtgaaggtccttgcccgaaggtctgtgaggaagaaaagaaaacaaagaccattgattctgttacttctgctcagatgctccaaggatgcaccatcttcaagggcaatttgctcattaacatccgacgggggaataacattgcttcagagctggagaacttcatggggctcatcgaggtggtgacgggctacgtgaagatccgccattctcatgccttggtctccttgtccttcctaaaaaaccttcgcctcatcctaggagaggagcagctagaagggaattactccttctacgtcctcgacaaccagaacttgcagcaactgtgggactgggaccaccgcaacctgaccatcaaagcagggaaaatgtactttgctttcaatcccaaattatgtgtttccgaaatttaccgcatggaggaagtgacggggactaaagggcgccaaagcaaaggggacataaacaccaggaacaacggggagagagcctcctgtgaaagtgacgtcctgcatttcacctccaccaccacgtcgaagaatcgcatcatcataacctggcaccggtaccggccccctgactacagggatctcatcagcttcaccgtttactacaaggaagcaccctttaagaatgtcacagagtatgatgggcaggatgcctgcggctccaacagctggaacatggtggacgtggacctcccgcccaacaaggacgtggagcccggcatcttactacatgggctgaagccctggactcagtacgccgtttacgtcaaggctgtgaccctcaccatggtggagaacgaccatatccgtggggccaagagtgagatcttgtacattcgcaccaatgcttcagttccttccattcccttggacgttctttcagcatcgaactcctcttctcagttaatcgtgaagtggaaccctccctctctgcccaacggcaacctgagttactacattgtgcgctggcagcggcagcctcaggacggctacctttaccggcacaattactgctccaaagacaaaatccccatcaggaagtatgccgacggcaccatcgacattgaggaggtcacagagaaccccaagactgaggtgtgtggtggggagaaagggccttgctgcgcctgccccaaaactgaagccgagaagcaggccgagaaggaggaggctgaataccgcaaagtctttgagaatttcctgcacaactccatcttcgtgcccagacctgaaagtgatcaagagcccaaatcttgtgacaaaactcacacatctccaccgtgctcagcacctgaactcctgggtggaccgtcagtcttcctcttccccccaaaacccaaggacaccctcatgatctcccggacccctgaggtcacatgcgtggtggtggacgtgagccacgaagaccctgaggtcaagttcaactggtacgtggacggcgtggaggtgcataatgccaagacaaagccgcgggaggagcagtacaacagcacgtaccgtgtggtcagcgtcctcaccgtcctgcaccaggactggctgaatggcaaggagtacaagtgcaaggtctccaacaaagccctcccagcccccatcgagaaaaccatctccaaagccaaagggcagccccgagaaccacaggtgtacaccctgcccccatcccgggatgagctgaccaagaaccaggtcagcctgacctgcctggtcaaaggcttctatccaagcgacatcgccgtggagtgggagagcaatgggcagccggagaacaactacaagaccacgcctcccgtgctggactccgacggctccttcttcctctacagcaagctcaccgtggacaagagcaggtggcagcaggggaacgtcttctcatgctccgtgatgcatgaggctctgcacaaccactacacgcagaagagcctctccctgtctccgggtaaa

SEQ ID NO: 816 - protein, 288 aa, Human
LRLLDHRALVCSQPGLNCTVKNSTCLDDSWIHPRNLTPSSPKDLQIQLHFAHTQQGDLFPVAHIEWTLQTDASILYLEGAELSVLQLNTNERLCVRFEFLSKLRHHHRRWRFTFSHFVVDPDQEYEVTVHHLPKPIPDGDPNHQSKNFLVPDCEHARMKVTTPCMSSGSLWDPNITVETLEAHQLRVSFTLWNESTHYQILLTSFPHMENHSCFEHMHHIPAPRPEEFHQRSNVTLTLRNLKGCCRHQVQIQPFFSSCLNDCLRHSATVSCPEMPDTPEPIPDYMPLW

SEQ ID NO: 817 - protein, 348 aa, Human
LERLVGPQDATHCSPGLSCRLWDSDILCLPGDIVPAPGPVLAPTHLQTELVLRCQKETDCDLCLRVAVHLAVHGHWEEPEDEEKFGGAADSGVEEPRNASLQAQVVLSFQAYPTARCVLLEVQVPAALVQFGQSVGSVVYDCFEAALGSEVRIWSYTQPRYEKELNHTQQLPALPWLNVSADGDNVHLVLNVSEEQHFGLSLYWNQVQGPPKPRWHKNLTGPQIITLNHTDLVPCLCIQVWPLEPDSVRTNICPFREDPRAHQNLWQAARLRLLTLQSWLLDAPCSLPAEAALCWRAPGGDPCQPLVPPLSWENVTVDKVLEFPLLKGHPNLCVQVNSSEKLQLQECL

SEQ ID NO: 818 - protein, 481 aa, Human
EICGPGIDIRNDYQQLKRLENCTVIEGYLHILLISKAEDYRSYRFPKLTVITEYLLLFRVAGLESLGDLFPNLTVIRGWKLFYNYALVIFEMTNLKDIGLYNLRNITRGAIRIEKNADLCYLSTVDWSLILDAVSNNYIVGNKPPKECGDLCPGTMEEKPMCEKTTINNEYNYRCWTTNRCQKMCPSTCGKRACTENNECCHPECLGSCSAPDNDTACVACRHYYYAGVCVPACPPNTYRFEGWRCVDRDFCANILSAESSDSEGFVIHDGECMQECPSGFIRNGSQSMYCIPCEGPCPKVCEEEKKTKTIDSVTSAQMLQGCTIFKGNLLINIRRGNNIASELENFMGLIEVVTGYVKIRHSHALVSLSFLKNLRLILGEEQLEGNYSFYVLDNQNLQQLWDWDHRNLTIKAGKMYFAFNPKLCVSEIYRMEEVTGTKGRQSKGDINTRNNGERASCESDVLHFTSTTTSKNRIIITWHA

SEQ ID NO: 819 - protein, 10 aa, Human
EPKSCDKTHT

SEQ ID NO: 820 - protein, 7 aa, Human
ERKCCVE

SEQ ID NO: 821 - protein, 12 aa, Human
ELKTPLGDTTHT

SEQ ID NO: 822 - protein, 10 aa, Human
EPKSCDTPPP

SEQ ID NO: 823 - protein, 7 aa, Human
ESKYGPP

SEQ ID NO: 824 - protein, 5 aa, Human
CPRCP

SEQ ID NO: 825 - protein, 5 aa, Human
CPSCP

SEQ ID NO: 826 - protein, 17 aa, Human
ELKTPLGDTTHTCPRCP

SEQ ID NO: 827 - protein, 15 aa, Human
EPKSCDTPPPCPRCP

SEQ ID NO: 828 - protein, 34 aa, Human
ESPKAQASSVPTAQPQAEGSLAKATTAPATTRNT

SEQ ID NO: 829 - protein, 24 aa, Human
GRGGEEKKKEKEKEEQEERETKTP

SEQ ID NO: 830 - protein, 19 aa, Human
VPSTPPTPSPSTPPTPSPS

SEQ ID NO: 831 - protein, 6 aa, Human
VPPPPP

SEQ ID NO: 832 - protein, 107 aa, Human
VCSRDFTPPTVKILQSSSDGGGHFPPTIQLLCLVSGYTPGTINITWLEDGQVMDVDLSTASTTQEGELASTQSELTLSQKHWLSDRTYTCQVTYQGHTFEDSTKKCA

SEQ ID NO: 833 - protein, 112 aa, Human
VIAELPPKVSVFVPPRDGFFGNPRKSKLICQATGFSPRQIQVSWLREGKQVGSGVTTDQVQAEAKESGPTTYKVTSTLTIKESDWLGQSMFTCRVDHRGLTFQQNASSMCVP

SEQ ID NO: 834 - protein, 5 aa, Human
CPPCP

1. A multi-specific fusion protein comprising a structure from amino terminus to carboxy terminus selected from the group consisting of:
(a) BD-ID-ED;
(b) ED-ID-BD; and
(c) ED1-ID-ED2
wherein:
ED is a TNFα antagonist, and ED1 and ED2 are different binding or ectodomains wherein ED1 or ED2 is a TNFα antagonist;
ID is an intervening domain; and
BD is a binding domain of an IL6 antagonist, a RANKL antagonist, an IL7 antagonist, an IL17A/F antagonist, a TWEAK antagonist, a CSF2 antagonist, an IGF antagonist, a BLyS/APRIL antagonist, or an ILIO agonist.

2. The multi-specific fusion protein of claim 1, wherein the BD is an immunoglobulin variable binding domain.

3. The multi-specific fusion protein of claim 1, wherein the ED1 and the ED2 are receptor ligand binding ectodomains.

4. The multi-specific fusion protein of claim 1, wherein the intervening domain has the following structure:
-L1-CH2CH3-,
wherein:
L1 is an immunoglobulin hinge linker; and
—CH2CH3- is the CH2CH3 region of an IgG1 Fc domain.

5. The multi-specific fusion protein of claim 1, wherein the BD is connected to the intervening domain by a first linker and the ED is connected to the intervening domain by a second linker, wherein the first and second linkers are the same or different.

6. The multi-specific fusion protein of claim 5, wherein the first and second linkers are selected from the group consisting of SEQ ID NO:497-604 and 791-796.

7. The multi-specific fusion protein of claim 1, comprising an amino acid sequence which is selected from the group consisting of SEQ ID NOS:607-670 and 798-804.

8. A composition comprising the multi-specific fusion protein of claim 1 and a pharmaceutically acceptable carrier, diluent, or excipient.

9. The composition of claim 8 wherein the multi-specific fusion protein exists as a dimer or a multimer in the composition.

10. A polynucleotide encoding the multi-specific fusion protein of claim 1.

11. An expression vector comprising the polynucleotide of claim 10, which is operably linked to an expression control sequence.

12. A host cell comprising the expression vector of claim 11.

13. A method for treating a subject with an inflammatory, autoimmune, or hyperproliferative disorder comprising administering to a subject in need thereof a therapeutically effective amount of the multi-specific fusion protein of claim 1.

14. The method of claim 13 wherein the disorder is selected from, the group consisting of rheumatoid arthritis, ankylosing spondylitis, juvenile rheumatoid arthritis, juvenile idiopathic arthritis, psoriatic arthritis, psoriasis, chronic obstructive pulmonary disease (COPD), Chron's disease, ulcerative colitis, severe refractory asthma, TNFRSF1A-associated periodic syndrome (TRAPS), endometriosis, systemic lupus erythematosus and Alzheimer's disease.

15. The multi-specific fusion protein of claim 4, wherein said immunoglobulin hinge linker is an IgG1 hinge having the first cysteine substituted with a different amino acid.

16. The multi-specific fusion protein of claim 4, wherein said CH2CH3 region of an IgG1 Fc domain is mutated to eliminate FcγRI-III binding while retaining FcRn binding.

17. The multi-specific fusion protein, of claim 6, wherein the first linker is SEQ ID NO:576 and the second linker is SEQ ID NO:791.

18. A method of producing a multi-specific fusion protein comprising culturing the host cell of claim 12 in a medium and expressing the protein.
